(19) United States
(12) Patent Application Publication
(10) Pub. No.: US 2021/0269858 A1
(43) Pub. Date: Sep. 2, 2021

(54) METHODS FOR DETECTING AND SEQUENCING A TARGET NUCLEIC ACID

(71) Applicant: The Regents of the University of California, Oakland, CA (US)

(72) Inventors: Charles Chiu, San Francisco, CA (US); Andrea Granados, San Francisco, CA (US); Jennifer A. Doudna, Berkeley, CA (US); Lucas B. Harrington, Berkeley, CA (US); Janice S. Chen, Berkeley, CA (US); Xianding Deng, San Francisco, CA (US)

(21) Appl. No.: 17/319,907

(22) Filed: May 13, 2021

Related U.S. Application Data
(63) Continuation of application No. PCT/US2019/062033, filed on Nov. 18, 2019.
(60) Provisional application No. 62/769,410, filed on Nov. 19, 2018.

(51) Int. Cl. C12Q 1/6806; C12Q 1/70; C12Q 1/689; C12Q 1/6893; C12Q 1/6895; C12Q 1/6888

(52) U.S. Cl. CPC C12Q 1/6806; C12Q 1/701; C12Q 1/6888; C12Q 1/6893; C12Q 1/6895; C12Q 1/689

(57) ABSTRACT

The present disclosure provides methods for characterizing a target DNA present in a sample. The methods involve contacting the sample with a type V CRISPR/Cas effector protein and one or more guide RNAs, where the contacting generates a cleavage product comprising a 5′ overhang; and ligating a double-stranded nucleic acid adapter to the cleavage product, to generate a ligation product. The ligation product includes the target DNA, which can be sequenced. The sample can be subjected to one or more amplification steps prior to the contacting step, with primers that provide for amplification of nucleic acids of, e.g., specific pathogens, categories of pathogens, two or more different pathogens, or two or more different categories of pathogens.

### CROSS-REFERENCE

[0001] This application is a continuation of International Application No. PCT/US2019/062033, filed Nov. 18, 2019, which application claims the benefit of U.S. Provisional Patent Application No. 62/769,410, filed Nov. 19, 2018, which applications are incorporated herein by reference in their entirety.

### STATEMENT REGARDING FEDERALLY SPONSORED RESEARCH

[0002] This invention was made with government support under 0950971 awarded by the National Science Foundation and under AI120977 and HL105704 awarded by the National Institutes of Health. The government has certain rights in the invention

### INCORPORATION BY REFERENCE OF SEQUENCE LISTING

[0003] Accompanying this filing is a Sequence Listing entitled “Sequence-Listing_ST25.txt”, created on May 12, 2021 and having 3,619,630 bytes of data, machine formatted on IBM-PC, MS-Windows operating system. The sequence listing is hereby incorporated herein by reference in its entirety for all purposes.

### INTRODUCTION

[0004] Bacterial adaptive immune systems employ CRISPRs (clustered regularly interspaced short palindromic repeats) and CRISPR-associated (Cas) proteins for RNA-guided nucleic acid cleavage. The CRISPR-Cas systems thereby confer adaptive immunity in bacteria and archaea via RNA-guided nucleic acid interference. To provide anti-viral immunity, processed CRISPR array transcripts (crRNAs) assemble with Cas protein-containing surveillance complexes that recognize nucleic acids bearing sequence complementarity to the virus derived segment of the crRNAs, known as the spacer.

[0005] Class 2 CRISPR-Cas systems are streamlined versions in which a single Cas protein (an effector protein, e.g., a type V Cas effector protein such as Cpfl) bound to RNA is responsible for binding to and cleavage of a targeted sequence. The programmable nature of these minimal systems has facilitated their use as a versatile technology that continues to revolutionize the field of genome manipulation.

### SUMMARY

[0006] The present disclosure provides methods for characterizing a target DNA present in a sample. The methods involve contacting the sample with a type V CRISPR/Cas effector protein and one or more guide RNAs, where the contacting step generates a cleavage product comprising a 5′ overhang; and ligating a double-stranded nucleic acid adapter to the cleavage product, to generate a ligation product. The ligation product includes the target DNA, which can be sequenced. The sample can be subjected to one or more amplification steps prior to the contacting step, with primers that provide for amplification of nucleic acids of, e.g., specific pathogens, categories of pathogens, two or more different pathogens, or two or more different categories of pathogens.

### BRIEF DESCRIPTION OF THE DRAWINGS

[0007] FIG. 1 depicts detection of Escherichia coli DNA using a Cas12a effector protein and guide RNAs targeting conserved regions of 16S rDNA. Using this system (referred to as “DETECTR”, E. coli DNA can be detected within 30 minutes.

[0008] FIG. 2 depicts cleavage site mapping of 16S rDNA target sequences. Substrates were 5′ radiolabelled and mapped on a denaturing polyacrylamide gel electrophoresis (PAGE) gel to identify cleavage sites. LbCas12a leaves an 8-10 nucleotide 5′ overhang.

[0009] FIG. 3 is a schematic depiction of Cas12 cleavage and adapter ligation for nanopore sequencing. Following Cas12a cleavage and DNA detection, the PAM-distal product containing a 5′ overhang is released from the complex, which is simultaneously ligated to a “clicker” molecule (also referred to herein as an “adapter”) that can be directly coupled with next-generation sequencing protocols. The “clicker” contains a sequence complementary to the cleaved product for selective ligation and a 3′ dA for adapter ligation (e.g., ligation to further adapters).

[0010] FIG. 4 depicts polymerase chain reaction (PCR) verification of clicker ligation using polymerase chain reaction (PCR). 16S rDNA sequences were amplified from genomic E. coli DNA and treated with the conditions indicated in the figure. The strand of the clicker molecule containing the 3′ dA and complementary sequence was phosphorylated. Cas12-crRNA cleavage and clicker ligation were performed in a single step, in the presence of 1× binding buffer and 1×T4 ligase buffer at room temperature for 1 hour. Cleavage/ligation was verified by PCR amplification using a forward primer specific to the clicker and a reverse primer specific to the cleaved product.

[0011] FIG. 5 provides Table 2, which provides examples of crRNA and clicker sequences (from top to bottom: SEQ ID NO:29 to SEQ ID NO:40).

[0012] FIG. 6A-6V provide amino acid sequences of various Type V CRISPR/Cas effector proteins (depicted are Cas12b sequences) (FIG. 6A-6J; from top to bottom: SEQ ID NO:41 to SEQ ID NO:50); amino acid sequences of various Type V CRISPR/Cas effector proteins (depicted are Cas12a and Cas12b sequences) (FIG. 6K-6T; from top to bottom: SEQ ID NO:51 to SEQ ID NO:60); and example guide RNA sequences (e.g., crRNA repeat sequences and an example single guide RNA sequence) and example PAM sequences (FIG. 6U and FIG. 6V).

[0013] FIG. 7A-7B provide amino acid sequences of Type V CRISPR/Cas effector proteins (depicted are Cas12e sequences).

[0014] FIG. 8 provides a list of target antibiotic resistance genes.

[0015] FIG. 9A-9B provides a schematic depiction of a method of designing primers suitable for amplifying target nucleic acids encoding antibiotic resistance factors.

[0016] FIG. 10A-10B provide an algorithm for primer design and a sequencing workflow.

[0017] FIG. 11 provides a table showing detection of targeted viruses using MSSPE.

[0018] FIG. 12 provides a table showing viral genome coverage using MSSPE.

[0019] FIG. 13 provides a table showing detection of untargeted emerging or novel viruses using MSSPE.

### DEFINITIONS

[0020] The terms “polynucleotide” and “nucleic acid,” used interchangeably herein, refer to a polymeric form of nucleotides of any length, either ribonucleotides or deoxyribonucleotides. Thus, terms “polynucleotide” and “nucleic acid” encompass single-stranded DNA; double-stranded DNA; multi-stranded DNA; single-stranded RNA; double-stranded RNA; multi-stranded RNA; genomic DNA; cDNA; DNA-RNA hybrids; and a polymer comprising purine and pyrimidine bases or other natural, chemically or biochemically modified, non-natural, or derivatized nucleotide bases.

[0021] The term “oligonucleotide” refers to a polynucleotide of between 4 and 100 nucleotides of single- or double-stranded nucleic acid (e.g., DNA, RNA, or a modified nucleic acid). However, for the purposes of this disclosure, there is no upper limit to the length of an oligonucleotide. Oligonucleotides are also known as “oligomers” or “oligos” and can be isolated from genes, transcribed (in vitro and/or in vivo), or chemically synthesized. The terms “polynucleotide” and “nucleic acid” should be understood to include, as applicable to the embodiments being described, single-stranded (such as sense or antisense) and double-stranded polynucleotides.

[0022] By “hybridizable” or “complementary” or “substantially complementary” it is meant that a nucleic acid (e.g. RNA, DNA) comprises a sequence of nucleotides that enables it to non-covalently bind, i.e. form Watson-Crick base pairs and/or G/U base pairs, “anneal”, or “hybridize,” to another nucleic acid in a sequence-specific, antiparallel, manner (i.e., a nucleic acid specifically binds to a complementary nucleic acid) under the appropriate in vitro and/or in vivo conditions of temperature and solution ionic strength. Standard Watson-Crick base-pairing includes: adenine/adenosine) (A) pairing with thymidine/thymidine (T), A pairing with uracil/uridine (U), and guanine/guanosine) (G) pairing with cytosine/cytidine (C). In addition, for hybridization between two RNA molecules (e.g., dsRNA), and for hybridization of a DNA molecule with an RNA molecule (e.g., when a DNA target nucleic acid base pairs with a guide RNA, etc.): G can also base pair with U. For example, G/U base-pairing is partially responsible for the degeneracy (i.e., redundancy) of the genetic code in the context of tRNA anti-codon base-pairing with codons in mRNA. Thus, in the context of this disclosure, a G (e.g., of a protein-binding segment (e.g., dsRNA duplex) of a guide RNA molecule; of a target nucleic acid (e.g., target DNA) base pairing with a guide RNA) is considered complementary to both a U and to C. For example, when a G/U base-pair can be made at a given nucleotide position of a protein-binding segment (e.g., dsRNA duplex) of a guide RNA molecule, the position is not considered to be non-complementary, but is instead considered to be complementary.

[0023] Hybridization requires that the two nucleic acids contain complementary sequences, although mismatches between bases are possible. The conditions appropriate for hybridization between two nucleic acids depend on the length of the nucleic acids and the degree of complementarity, variables well known in the art. The greater the degree of complementarity between two nucleotide sequences, the greater the value of the melting temperature (Tm) for hybrids of nucleic acids having those sequences. Typically, the length for a hybridizable nucleic acid is 8 nucleotides or more (e.g., 10 nucleotides or more, 12 nucleotides or more, 15 nucleotides or more, 20 nucleotides or more, 22 nucleotides or more, 25 nucleotides or more, or 30 nucleotides or more).

[0024] It is understood that the sequence of a polynucleotide need not be 100% complementary to that of its target nucleic acid to be specifically hybridizable. Moreover, a polynucleotide may hybridize over one or more segments such that intervening or adjacent segments are not involved in the hybridization event (e.g., a loop structure or hairpin structure, a ‘bulge’, and the like). A polynucleotide can comprise 60% or more, 65% or more, 70% or more, 75% or more, 80% or more, 85% or more, 90% or more, 95% or more, 98% or more, 99% or more, 99.5% or more, or 100% sequence complementarity to a target region within the target nucleic acid sequence to which it will hybridize. For example, an antisense nucleic acid in which 18 of 20 nucleotides of the antisense compound are complementary to a target region, and would therefore specifically hybridize, would represent 90 percent complementarity. The remaining noncomplementary nucleotides may be clustered or interspersed with complementary nucleotides and need not be contiguous to each other or to complementary nucleotides. Percent complementarity between particular stretches of nucleic acid sequences within nucleic acids can be determined using any convenient method. Example methods include BLAST programs (basic local alignment search tools) and PowerBLAST programs (Altschul et al., J. Mol. Biol., 1990, 215, 403-410; Zhang and Madden, Genome Res., 1997, 7, 649-656) or by using the Gap program (Wisconsin Sequence Analysis Package, Version 8 for Unix, Genetics Computer Group, University Research Park, Madison Wis.), e.g., using default settings, which uses the algorithm of Smith and Waterman (Adv. Appl. Math., 1981, 2, 482-489).

[0025] The terms “peptide,” “polypeptide,” and “protein” are used interchangeably herein, and refer to a polymeric form of amino acids of any length, which can include coded and non-coded amino acids, chemically or biochemically modified or derivatized amino acids, and polypeptides having modified peptide backbones.

[0026] “Binding” as used herein (e.g. with reference to an RNA-binding domain of a polypeptide, binding to a target nucleic acid, and the like) refers to a non-covalent interaction between macromolecules (e.g., between a protein and a nucleic acid; between a guide RNA and a target nucleic acid; and the like). While in a state of non-covalent interaction, the macromolecules are said to be “associated” or “interacting” or “binding” (e.g., when a molecule X is said to interact with a molecule Y, it is meant the molecule X binds to molecule Y in a non-covalent manner). Not all components of a binding interaction need be sequence-specific (e.g., contacts with phosphate residues in a DNA backbone), but some portions of a binding interaction may be sequence-specific. Binding interactions are generally characterized by a dissociation constant (K_{d}) of less than 10⁻⁶ M, less than 10⁻⁷ M, less than 10⁻⁸ M, less than 10⁻⁹ M, less than 10⁻¹⁰ M, less than 10⁻¹¹ M, less than 10⁻¹² M, less than 10⁻¹³ M, less than 10⁻¹⁴ M, or less than 10⁻¹⁵ M. “Affinity” refers to the strength of binding, increased binding affinity being correlated with a lower K_{d}.

[0027] By “binding domain” it is meant a protein domain that is able to bind non-covalently to another molecule. A binding domain can bind to, for example, an RNA molecule (an RNA-binding domain) and/or a protein molecule (a protein-binding domain). In the case of a protein having a protein-binding domain, it can in some cases bind to itself (to form homodimers, homotrimers, etc.) and/or it can bind to one or more regions of a different protein or proteins.

[0028] The term “conservative amino acid substitution” refers to the interchangeability in proteins of amino acid residues having similar side chains. For example, a group of amino acids having aliphatic side chains consists of glycine, alanine, valine, leucine, and isoleucine; a group of amino acids having aliphatic-hydroxyl side chains consists of serine and threonine; a group of amino acids having amide containing side chains consisting of asparagine and glutamine; a group of amino acids having aromatic side chains consists of phenylalanine, tyrosine, and tryptophan; a group of amino acids having basic side chains consists of lysine, arginine, and histidine; a group of amino acids having acidic side chains consists of glutamate and aspartate; and a group of amino acids having sulfur containing side chains consists of cysteine and methionine. Exemplary conservative amino acid substitution groups are: valine-leucine-isoleucine, phenylalanine-tyrosine, lysine-arginine, alanine-valine-glycine, and asparagine-glutamine.

[0029] A polynucleotide or polypeptide has a certain percent “sequence identity” to another polynucleotide or polypeptide, meaning that, when aligned, that percentage of bases or amino acids are the same, and in the same relative position, when comparing the two sequences. Sequence identity can be determined in a number of different ways. To determine sequence identity, sequences can be aligned using various methods and computer programs (e.g., BLAST, T-COFFEE, MUSCLE, MAFFT, Phyre2, etc.), available over the world wide web at sites including ncbi.nlm.nili.gov/BLAST, ebi.ac.uk/Tools/msa/tcoffee/, ebi.ac.uk/Tools/msa/muscle/, mafft cbrcjp/alignment/software/, http://www.sbg.bio.ic.ac.uk/˜phyre2/. See, e.g., Altschul et al. (1990), J. Mol. Biol. 215:403-10.

[0030] Before the present invention is further described, it is to be understood that this invention is not limited to particular embodiments described, as such may, of course, vary. It is also to be understood that the terminology used herein is for the purpose of describing particular embodiments only, and is not intended to be limiting, since the scope of the present invention will be limited only by the appended claims.

[0031] Where a range of values is provided, it is understood that each intervening value, to the tenth of the unit of the lower limit unless the context clearly dictates otherwise, between the upper and lower limit of that range and any other stated or intervening value in that stated range, is encompassed within the invention. The upper and lower limits of these smaller ranges may independently be included in the smaller ranges, and are also encompassed within the invention, subject to any specifically excluded limit in the stated range. Where the stated range includes one or both of the limits, ranges excluding either or both of those included limits are also included in the invention.

[0032] Unless defined otherwise, all technical and scientific terms used herein have the same meaning as commonly understood by one of ordinary skill in the art to which this invention belongs. Although any methods and materials similar or equivalent to those described herein can also be used in the practice or testing of the present invention, the preferred methods and materials are now described. All publications mentioned herein are incorporated herein by reference to disclose and describe the methods and/or materials in connection with which the publications are cited.

[0033] It must be noted that as used herein and in the appended claims, the singular forms “a,” “an,” and “the” include plural referents unless the context clearly dictates otherwise. Thus, for example, reference to “a type V CRISPR/Cas effector polypeptide” includes a plurality of such polypeptides and reference to “the guide RNA” includes reference to one or more guide RNAs and equivalents thereof known to those skilled in the art, and so forth. It is further noted that the claims may be drafted to exclude any optional element. As such, this statement is intended to serve as antecedent basis for use of such exclusive terminology as “solely,” “only” and the like in connection with the recitation of claim elements, or use of a “negative” limitation.

[0034] It is appreciated that certain features of the invention, which are, for clarity, described in the context of separate embodiments, may also be provided in combination in a single embodiment. Conversely, various features of the invention, which are, for brevity, described in the context of a single embodiment, may also be provided separately or in any suitable sub-combination. All combinations of the embodiments pertaining to the invention are specifically embraced by the present invention and are disclosed herein just as if each and every combination was individually and explicitly disclosed. In addition, all sub-combinations of the various embodiments and elements thereof are also specifically embraced by the present invention and are disclosed herein just as if each and every such sub-combination was individually and explicitly disclosed herein.

[0035] The publications discussed herein are provided solely for their disclosure prior to the filing date of the present application. Nothing herein is to be construed as an admission that the present invention is not entitled to antedate such publication by virtue of prior invention. Further, the dates of publication provided may be different from the actual publication dates which may need to be independently confirmed.

### DETAILED DESCRIPTION

[0036] The present disclosure provides methods for characterizing a target DNA that is present in a sample. The methods involve contacting the sample with a type V CRISPR/Cas effector protein and one or more guide RNAs, where the contacting step generates a protospacer-adjacent motif (PAM)-distal cleavage product comprising a 5′ overhang; and ligating a double-stranded nucleic acid adapter to the cleavage product, to generate a ligation product. The double-stranded nucleic acid adapter comprises a 5′ overhang that comprises a stretch of from 3 to 15 contiguous nucleotides that are complementary to a contiguous stretch of nucleotides of the same length in the 5′ overhang of the PAM-distal cleavage product. The ligation product includes the target DNA, which can be sequenced. The sample can be subjected to one or more amplification steps prior to the contacting step, with primers that provide for amplification of nucleic acids of, e.g., specific pathogens, categories of pathogens, two or more different pathogens, or two or more different categories of pathogens. The pre-amplified sample can also be contacted with a ssDNA reporter molecule that provides a readout when the type V CRISPR/Cas effector contacts the target DNA. The present disclosure provides a kit comprising components for carrying out a method of the present disclosure.

[0037] A kit or method of the present disclosure finds use in a wide variety of areas, including, e.g., infectious disease identification, and the like.

### Methods for Characterizing a Target DNA

[0038] The present disclosure provides methods for characterizing a target DNA that is present in a sample. The methods involve contacting the sample with a type V CRISPR/Cas effector protein and one or more guide RNAs, where the contacting step generates a protospacer-adjacent motif (PAM)-distal cleavage product comprising a 5′ overhang; and ligating a double-stranded nucleic acid adapter to the cleavage product, to generate a ligation product. The double-stranded nucleic acid adapter comprises a 5′ overhang that comprises a stretch of from 3 to 15 contiguous nucleotides that are complementary to a contiguous stretch of nucleotides of the same length in the 5′ overhang of the PAM-distal cleavage product. The ligation product includes the target DNA, which can be sequenced. The sample can be subjected to one or more amplification steps prior to the contacting step, with primers that provide for amplification of nucleic acids of, e.g., specific pathogens, categories of pathogens, two or more different pathogens, or two or more different categories of pathogens. The sample can also be subjected to one or more nucleic acid modification steps before contacting the sample with a type V CRISPR/Cas effector protein and/or prior to ligation. The sample can also be contacted with a ssDNA reporter molecule (a labelled single-stranded detector DNA), a guide RNA, and a type V CRISPR/Cas effector protein, such that, upon contact with a target DNA present in the sample, a signal is produced. For example, in some cases, a method of the present disclosure comprises: a) contacting a sample comprising (or suspected of comprising) a target nucleic acid with: i) a type V CRISPR/Cas effector polypeptide; ii) a guide RNA; and iii) a labelled single-stranded detector DNA, where the labelled single-stranded detector DNA produces a signal when the target nucleic acid is present in the sample, and where the contacting step generates a PAM-distal cleavage product comprising a 5′ overhang; and b) and ligating a double-stranded nucleic acid adapter to the cleavage product, to generate a ligation product. In some cases, a method of the present disclosure comprises: a) contacting a sample comprising (or suspected of comprising) a target nucleic acid with one or more amplification primers or primer pairs, thereby generating an amplification product(s); b) contacting the sample comprising the amplification product(s) with: i) a type V CRISPR/Cas effector polypeptide; ii) a guide RNA; and iii) a labelled single-stranded detector DNA, where the labelled single-stranded detector DNA produces a signal when the target nucleic acid is present in the sample, and where the contacting step generates a PAM-distal cleavage product comprising a 5′ overhang; and c) and ligating a double-stranded nucleic acid adapter to the cleavage product, to generate a ligation product. In some cases, a method of the present disclosure comprises: a) contacting a sample comprising (or suspected of comprising) a target ribonucleic acid with a reverse transcriptase, thereby generating a target DNA; b) contacting the sample comprising the comprising the target DNA with: i) a type V CRISPR/Cas effector polypeptide; ii) a guide RNA; and iii) a labelled single-stranded detector DNA, where the labelled single-stranded detector DNA produces a signal when the target nucleic acid is present in the sample, and where the contacting step generates a PAM-distal cleavage product comprising a 5′ overhang; and c) and ligating a double-stranded nucleic acid adapter to the cleavage product, to generate a ligation product. In some cases, a method of the present disclosure comprises: a) contacting a sample comprising (or suspected of comprising) a target ribonucleic acid with a reverse transcriptase, thereby generating a target DNA; b) contacting the sample comprising the target DNA with one or more amplification primers or primer pairs, thereby generating an amplification product(s); c) contacting the sample comprising the amplification product(s) with: i) a type V CRISPR/Cas effector polypeptide; ii) a guide RNA; and iii) a labelled single-stranded detector DNA, where the labelled single-stranded detector DNA produces a signal when the target nucleic acid is present in the sample, and where the contacting step generates a PAM-distal cleavage product comprising a 5′ overhang; and d) and ligating a double-stranded nucleic acid adapter to the cleavage product, to generate a ligation product.

[0039] As noted above, in some cases, the ligation product is sequenced; e.g., the target DNA present in the ligation product is sequenced. The contacting, ligating, and sequencing steps can be carried out in a single reaction container (also referred to herein as a “reaction vessel”). Thus, in a single reaction container, a target DNA can be both detected and sequenced. In some cases, the contacting and ligating steps are carried out in a first reaction container; and the sequencing step is carried out in a second reaction container.

[0040] Cleavage of a target DNA with a type V CRISPR/Cas effector polypeptide (e.g., a Cas12 polypeptide) generates a cleavage product having a 5′ overhang of from about 4 nucleotides to about 12 nucleotides in length. This 5′ overhang can provide a point of hybridization for an adapter molecule (e.g., a double-stranded nucleic acid adapter) having a 5′ overhang with a nucleotide sequence that is at least partially complementary to the nucleotide sequence of the 5′ overhang of the type V CRISPR/Cas effector polypeptide cleavage product. The adapter molecule can be ligated to the type V CRISPR/Cas effector polypeptide cleavage product, generating a type V CRISPR/Cas effector polypeptide cleavage product/adapter hybrid nucleic acid. The type V CRISPR/Cas effector polypeptide cleavage product/adapter hybrid nucleic acid can be ligated to one or more additional adapters, e.g., an adapter that provides a bar code, an adapter that allows for next-generation sequencing, and the like. For example, the one or more additional adapters can include a nucleotide sequence specific for coupling to a sequencing platform; such an adapter may also include a barcode sequence. In some cases, the additional adapter comprises a nucleotide sequence that is at least 70% identical to a support-bound oligonucleotide conjugated to a solid support; in some cases, the solid support is coupled to a sequencing platform. In some cases, the additional adapter comprises a binding site for a sequencing primer. Ligation of various adapters to a type V CRISPR/Cas effector polypeptide cleavage product is depicted schematically in FIG. 3.

[0041] The contacting step of a subject method can be carried out in a composition comprising divalent metal ions. The contacting step can be carried out in an acellular environment, e.g., outside of a cell. The contacting step can be carried out inside a cell. The contacting step can be carried out in a cell in vitro. The contacting step can be carried out in a cell ex vivo. The contacting step can be carried out in a cell in vivo.

[0042] As noted above, nucleic acid(s) present in a sample can be subjected to one or more nucleic acid modification steps before contacting the sample with a type V CRISPR/Cas effector protein and/or prior to ligation. For example, in some cases, a dsDNA can be subjected to dephosphorylation prior to cleavage with a type V CRISPR/Cas effector protein. The dephosphorylation step would avoid sequencing of dsDNA not cleaved by the type V CRISPR/Cas effector protein. As another example, in some cases, a dsDNA is cleaved with a type V CRISPR/Cas effector protein and, prior to ligation with a double-stranded nucleic acid adapter, the cleavage product is subjected to Klenow repair of overhangs, e.g., to fill in a 3′ overhang.

[0043] The guide RNA can be provided as RNA or as a nucleic acid encoding the guide RNA (e.g., a DNA such as a recombinant expression vector). The Type V CRISPR/Cas effector protein (e.g., a Cas12 protein such as Cas12a, Cas12b, Cas12c, Cas12d, Cas12e) can be provided as a protein or as a nucleic acid encoding the protein (e.g., an mRNA, a DNA such as a recombinant expression vector). In some cases, two or more (e.g., 3 or more, 4 or more, 5 or more, or 6 or more) guide RNAs can be provided by (e.g., using a precursor guide RNA array, which can be cleaved by the Type V CRISPR/Cas effector protein into individual (“mature”) guide RNAs).

[0044] In some cases (e.g., when contacting with a guide RNA and a Type V CRISPR/Cas effector protein (e.g., a Cas12 protein such as Cas12a, Cas12b, Cas12c, Cas12d, Cas12e)), the sample is contacted for 2 hours or less (e.g., 1.5 hours or less, 1 hour or less, 40 minutes or less, 30 minutes or less, 20 minutes or less, 10 minutes or less, or 5 minutes or less, or 1 minute or less) prior to the ligating step. For example, in some cases, the sample is contacted for 40 minutes or less prior to the ligating step. In some cases, the sample is contacted for 20 minutes or less prior to the ligating step. In some cases, the sample is contacted for 10 minutes or less prior to the ligating step. In some cases, the sample is contacted for 5 minutes or less prior to the ligating step. In some cases, the sample is contacted for 1 minute or less prior to the ligating step. In some cases, the sample is contacted for from 50 seconds to 60 seconds prior to the ligating step. In some cases, the sample is contacted for from 40 seconds to 50 seconds prior to the ligating step. In some cases, the sample is contacted for from 30 seconds to 40 seconds prior to the ligating step. In some cases, the sample is contacted for from 20 seconds to 30 seconds prior to the ligating step. In some cases, the sample is contacted for from 10 seconds to 20 seconds prior to the ligating step.

[0045] A method of the present disclosure for characterizing a target DNA (single-stranded or double-stranded) in a sample can provide for characterization of a target DNA with a high degree of sensitivity. In some cases, a method of the present disclosure can be used to characterize a target DNA present in a sample comprising a plurality of DNAs (including the target DNA and a plurality of non-target DNAs), where the target DNA is present at one or more copies per 10⁷ non-target DNAs (e.g., one or more copies per 10⁶ non-target DNAs, one or more copies per 10⁵ non-target DNAs, one or more copies per 10⁴ non-target DNAs, one or more copies per 10³ non-target DNAs, one or more copies per 10² non-target DNAs, one or more copies per 50 non-target DNAs, one or more copies per 20 non-target DNAs, one or more copies per 10 non-target DNAs, or one or more copies per 5 non-target DNAs). In some cases, a method of the present disclosure can be used to characterize a target DNA present in a sample comprising a plurality of DNAs (including the target DNA and a plurality of non-target DNAs), where the target DNA is present at one or more copies per 10¹⁸ non-target DNAs (e.g., one or more copies per 10¹⁵ non-target DNAs, one or more copies per 10¹² non-target DNAs, one or more copies per 10⁹ non-target DNAs, one or more copies per 10⁶ non-target DNAs, one or more copies per 10⁵ non-target DNAs, one or more copies per 10⁴ non-target DNAs, one or more copies per 10³ non-target DNAs, one or more copies per 10² non-target DNAs, one or more copies per 50 non-target DNAs, one or more copies per 20 non-target DNAs, one or more copies per 10 non-target DNAs, or one or more copies per 5 non-target DNAs).

[0046] In some cases, a method of the present disclosure can characterize a target DNA present in a sample, where the target DNA is present at from one copy per 10⁷ non-target DNAs to one copy per 10 non-target DNAs (e.g., from 1 copy per 10⁷ non-target DNAs to 1 copy per 10² non-target DNAs, from 1 copy per 10⁷ non-target DNAs to 1 copy per 10³ non-target DNAs, from 1 copy per 10⁷ non-target DNAs to 1 copy per 10⁴ non-target DNAs, from 1 copy per 10⁷ non-target DNAs to 1 copy per 10⁵ non-target DNAs, from 1 copy per 10⁷ non-target DNAs to 1 copy per 10⁶ non-target DNAs, from 1 copy per 10⁶ non-target DNAs to 1 copy per 10 non-target DNAs, from 1 copy per 10⁶ non-target DNAs to 1 copy per 10² non-target DNAs, from 1 copy per 10⁶ non-target DNAs to 1 copy per 10³ non-target DNAs, from 1 copy per 10⁶ non-target DNAs to 1 copy per 10⁴ non-target DNAs, from 1 copy per 10⁶ non-target DNAs to 1 copy per 10⁵ non-target DNAs, from 1 copy per 10⁵ non-target DNAs to 1 copy per 10 non-target DNAs, from 1 copy per 10⁵ non-target DNAs to 1 copy per 10² non-target DNAs, from 1 copy per 10⁵ non-target DNAs to 1 copy per 10³ non-target DNAs, or from 1 copy per 10⁵ non-target DNAs to 1 copy per 10⁴ non-target DNAs).

[0047] In some cases, a method of the present disclosure can characterize a target DNA present in a sample, where the target DNA is present at from one copy per 10¹⁸ non-target DNAs to one copy per 10 non-target DNAs (e.g., from 1 copy per 10¹⁸ non-target DNAs to 1 copy per 10² non-target DNAs, from 1 copy per 10¹⁵ non-target DNAs to 1 copy per 10² non-target DNAs, from 1 copy per 10¹² non-target DNAs to 1 copy per 10² non-target DNAs, from 1 copy per 10⁹ non-target DNAs to 1 copy per 10² non-target DNAs, from 1 copy per 10⁷ non-target DNAs to 1 copy per 10² non-target DNAs, from 1 copy per 10⁷ non-target DNAs to 1 copy per 10³ non-target DNAs, from 1 copy per 10⁷ non-target DNAs to 1 copy per 10⁴ non-target DNAs, from 1 copy per 10⁷ non-target DNAs to 1 copy per 10⁵ non-target DNAs, from 1 copy per 10⁷ non-target DNAs to 1 copy per 10⁶ non-target DNAs, from 1 copy per 10⁶ non-target DNAs to 1 copy per 10 non-target DNAs, from 1 copy per 10⁶ non-target DNAs to 1 copy per 10² non-target DNAs, from 1 copy per 10⁶ non-target DNAs to 1 copy per 10³ non-target DNAs, from 1 copy per 10⁶ non-target DNAs to 1 copy per 10⁴ non-target DNAs, from 1 copy per 10⁶ non-target DNAs to 1 copy per 10⁵ non-target DNAs, from 1 copy per 10⁵ non-target DNAs to 1 copy per 10 non-target DNAs, from 1 copy per 10⁵ non-target DNAs to 1 copy per 10² non-target DNAs, from 1 copy per 10⁵ non-target DNAs to 1 copy per 10³ non-target DNAs, or from 1 copy per 10⁵ non-target DNAs to 1 copy per 10⁴ non-target DNAs).

[0048] In some cases, a method of the present disclosure can characterize a target DNA present in a sample, where the target DNA is present at from one copy per 10⁷ non-target DNAs to one copy per 100 non-target DNAs (e.g., from 1 copy per 10⁷ non-target DNAs to 1 copy per 10² non-target DNAs, from 1 copy per 10⁷ non-target DNAs to 1 copy per 10³ non-target DNAs, from 1 copy per 10⁷ non-target DNAs to 1 copy per 10⁴ non-target DNAs, from 1 copy per 10⁷ non-target DNAs to 1 copy per 10⁵ non-target DNAs, from 1 copy per 10⁷ non-target DNAs to 1 copy per 10⁶ non-target DNAs, from 1 copy per 10⁶ non-target DNAs to 1 copy per 100 non-target DNAs, from 1 copy per 10⁶ non-target DNAs to 1 copy per 10² non-target DNAs, from 1 copy per 10⁶ non-target DNAs to 1 copy per 10³ non-target DNAs, from 1 copy per 10⁶ non-target DNAs to 1 copy per 10⁴ non-target DNAs, from 1 copy per 10⁶ non-target DNAs to 1 copy per 10⁵ non-target DNAs, from 1 copy per 10⁵ non-target DNAs to 1 copy per 100 non-target DNAs, from 1 copy per 10⁵ non-target DNAs to 1 copy per 10² non-target DNAs, from 1 copy per 10⁵ non-target DNAs to 1 copy per 10³ non-target DNAs, or from 1 copy per 10⁵ non-target DNAs to 1 copy per 10⁴ non-target DNAs).

[0049] In some cases, the target DNA is present in the sample at a concentration of 10 nM or less, e.g., from about 1 attomolar (aM) to about 100 aM, from about 100 aM to about 500 aM, from about 500 aM to about 1 femtomolar (fM), from about 1 fM to about 100 fM, from about 100 fM to about 500 fM, from about 500 fM to about 1 picomolar (pM), from about 1 pM to about 100 pM, from about 100 pM to about 500 pM, from about 500 pM to about 1 nanomolar (nM), from about 1 nM to about 100 nM, from about 100 nM to about 500 nM, or from about 500 nM to about 1 μM, or more than 1 μM.

[0050] In some cases, the target DNA is present in the sample at a concentration of from 500 fM to 1 nM (e.g., from 500 fM to 500 pM, from 500 fM to 200 pM, from 500 fM to 100 pM, from 500 fM to 10 pM, from 500 fM to 1 pM, from 800 fM to 1 nM, from 800 fM to 500 pM, from 800 fM to 200 pM, from 800 fM to 100 pM, from 800 fM to 10 pM, from 800 fM to 1 pM, from 1 pM to 1 nM, from 1 pM to 500 pM, from 1 pM to 200 pM, from 1 pM to 100 pM, or from 1 pM to 10 pM). In some cases,

### Type V CRISPR/Cas Effector Proteins

[0051] As noted above, a method of the present disclosure includes use of a Type V CRISPR/Cas effector polypeptide, where a sample that comprises, or is suspected of comprising, a target DNA is contacted with a Type V CRISPR/Cas effector polypeptide and one or more guide RNAs. Type V CRISPR/Cas effector proteins are a subtype of Class 2 CRISPR/Cas effector proteins. For examples of type V CRISPR/Cas systems and their effector proteins (e.g., Cas12 family proteins such as Cas12a), see, e g, Shmakov et al., Nat Rev Microbiol. 2017 March; 15(3):169-182: “Diversity and evolution of class 2 CRISPR-Cas systems.” Examples include, but are not limited to: Cas12 family (Cas12a, Cas12b, Cas12c), C2c4, C2c8, C2c5, C2c10, and C2c9; as well as CasX (Cas12e) and CasY (Cas12d). Also see, e.g., Koonin et al., Curr Opin Microbiol. 2017 June; 37:67-78: “Diversity, classification and evolution of CRISPR-Cas systems.”

[0052] In some cases, a type V CRISPR/Cas effector protein suitable for use in a method of the present disclosure is a Cas12 protein (e.g., Cas12a, Cas12b, Cas12c). In some cases, a suitable type V CRISPR/Cas effector protein is a Cas12 protein such as Cas12a, Cas12b, Cas12c, Cas12d, Cas12e, Cas12d, or Cas12e. In some cases, a suitable type V CRISPR/Cas effector protein is a Cas12a protein. In some cases, a suitable type V CRISPR/Cas effector protein is a Cas12b protein. In some cases, a suitable type V CRISPR/Cas effector protein is a Cas12c protein. In some cases, a suitable type V CRISPR/Cas effector protein is a Cas12d protein. In some cases, a suitable type V CRISPR/Cas effector protein is a Cas12e protein. In some cases, a suitable type V CRISPR/Cas effector protein is protein selected from: Cas12 (e.g., Cas12a, Cas12b, Cas12c, Cas12d, Cas12e), C2c4, C2c8, C2c5, C2c10, and C2c9. In some cases, a suitable type V CRISPR/Cas effector protein is protein selected from: C2c4, C2c8, C2c5, C2c10, and C2c9. In some cases, a suitable type V CRISPR/Cas effector protein is protein selected from: C2c4, C2c8, and C2c5. In some cases, a suitable type V CRISPR/Cas effector protein is protein selected from: C2c10 and C2c9.

[0053] In some cases, a suitable type V CRISPR/Cas effector protein is a naturally-occurring protein (e.g., naturally occurs in prokaryotic cells). In other cases, the Type V CRISPR/Cas effector protein is not a naturally-occurring polypeptide (e.g., the effector protein is a variant protein, a chimeric protein, includes a fusion partner, and the like). Examples of naturally occurring Type V CRISPR/Cas effector proteins include, but are not limited to, those depicted in FIG. 6 (e.g., FIG. 6A-6T). Any Type V CRISPR/Cas effector protein can be suitable for the compositions (e.g., nucleic acids, kits, etc.) and methods of the present disclosure (e.g., as long as the Type V CRISPR/Cas effector protein forms a complex with a guide RNA and exhibits ssDNA cleavage activity of non-target ssDNAs once it is activated (by hybridization of and associated guide RNA to its target DNA).

[0054] In some cases, a type V CRISPR/Cas effector protein comprises an amino acid sequence having 20% or more sequence identity (e.g., 30% or more, 40% or more, 50% or more, 60% or more, 70% or more, 80% or more, 85% or more, 90% or more, 95% or more, 97% or more, 98% or more, 99% or more, or 100% sequence identity) with a Cas12 protein (e.g., Cas12a, Cas12b, Cas12c) (e.g., a Cas12 protein depicted in any one of FIG. 6A-6T). For example, In some cases, a type V CRISPR/Cas effector protein comprises an amino acid sequence having 50% or more sequence identity (e.g., 60% or more, 70% or more, 80% or more, 85% or more, 90% or more, 95% or more, 97% or more, 98% or more, 99% or more, or 100% sequence identity) with a Cas12 protein (e.g., Cas12a, Cas12b, Cas12c) (e.g., a Cas12 protein depicted in FIG. 6). In some cases, a type V CRISPR/Cas effector protein comprises an amino acid sequence having 80% or more sequence identity (e.g., 85% or more, 90% or more, 95% or more, 97% or more, 98% or more, 99% or more, or 100% sequence identity) with a Cas12 protein (e.g., Cas12a, Cas12b, Cas12c) (e.g., a Cas12 protein depicted in any one of FIG. 6A-6T). In some cases, a type V CRISPR/Cas effector protein comprises an amino acid sequence having 90% or more sequence identity (e.g., 95% or more, 97% or more, 98% or more, 99% or more, or 100% sequence identity) with a Cas12 protein (e.g., Cas12a, Cas12b, Cas12c) (e.g., a Cas12 protein depicted in FIG. 6). In some cases, a type V CRISPR/Cas effector protein comprises a Cas12 amino acid sequence (e.g., Cas12a, Cas12b, Cas12c) depicted in any one of FIG. 6A-6T.

[0055] In some cases, a type V CRISPR/Cas effector protein comprises an amino acid sequence having 20% or more sequence identity (e.g., 30% or more, 40% or more, 50% or more, 60% or more, 70% or more, 80% or more, 85% or more, 90% or more, 95% or more, 97% or more, 98% or more, 99% or more, or 100% sequence identity) with a Cas12a protein (e.g., a Cas12a protein depicted in any FIG. 6). For example, in some cases, a type V CRISPR/Cas effector protein comprises an amino acid sequence having 50% or more sequence identity (e.g., 60% or more, 70% or more, 80% or more, 85% or more, 90% or more, 95% or more, 97% or more, 98% or more, 99% or more, or 100% sequence identity) with a Cas12a protein (e.g., a Cas12a protein depicted in FIG. 6). In some cases, a type V CRISPR/Cas effector protein comprises an amino acid sequence having 80% or more sequence identity (e.g., 85% or more, 90% or more, 95% or more, 97% or more, 98% or more, 99% or more, or 100% sequence identity) with a Cas12a protein (e.g., a Cas12a protein depicted in FIG. 6). In some cases, a type V CRISPR/Cas effector protein comprises an amino acid sequence having 90% or more sequence identity (e.g., 95% or more, 97% or more, 98% or more, 99% or more, or 100% sequence identity) with a Cas12a protein (e.g., a Cas12a protein depicted in FIG. 6). In some cases, a type V CRISPR/Cas effector protein comprises a Cas12a amino acid sequence depicted in FIG. 6.

[0056] In some cases, a suitable type V CRISPR/Cas effector protein comprises an amino acid sequence having 20% or more sequence identity (e.g., 30% or more, 40% or more, 50% or more, 60% or more, 70% or more, 80% or more, 85% or more, 90% or more, 95% or more, 97% or more, 98% or more, 99% or more, or 100% sequence identity) with the Lachnospiraceae bacterium ND2006 Cas12a protein amino acid sequence depicted in FIG. 6. In some cases, a suitable type V CRISPR/Cas effector protein comprises an amino acid sequence having 20% or more sequence identity (e.g., 30% or more, 40% or more, 50% or more, 60% or more, 70% or more, 80% or more, 85% or more, 90% or more, 95% or more, 97% or more, 98% or more, 99% or more, or 100% sequence identity) with the Acidaminococcus spBV3L6 Cas12a protein amino acid sequence depicted in FIG. 6. In some cases, a suitable type V CRISPR/Cas effector protein comprises an amino acid sequence having 20% or more sequence identity (e.g., 30% or more, 40% or more, 50% or more, 60% or more, 70% or more, 80% or more, 85% or more, 90% or more, 95% or more, 97% or more, 98% or more, 99% or more, or 100% sequence identity) with the Francisella novicida U112 Cas12a protein amino acid sequence depicted in FIG. 6. In some cases, a suitable type V CRISPR/Cas effector protein comprises an amino acid sequence having 20% or more sequence identity (e.g., 30% or more, 40% or more, 50% or more, 60% or more, 70% or more, 80% or more, 85% or more, 90% or more, 95% or more, 97% or more, 98% or more, 99% or more, or 100% sequence identity) with the Porphyromonas macacae Cas12a protein amino acid sequence depicted in FIG. 6. In some cases, a suitable type V CRISPR/Cas effector protein comprises an amino acid sequence having 20% or more sequence identity (e.g., 30% or more, 40% or more, 50% or more, 60% or more, 70% or more, 80% or more, 85% or more, 90% or more, 95% or more, 97% or more, 98% or more, 99% or more, or 100% sequence identity) with the Moraxella bovoculi 237 Cas12a protein amino acid sequence depicted in FIG. 6. In some cases, a suitable type V CRISPR/Cas effector protein comprises an amino acid sequence having 20% or more sequence identity (e.g., 30% or more, 40% or more, 50% or more, 60% or more, 70% or more, 80% or more, 85% or more, 90% or more, 95% or more, 97% or more, 98% or more, 99% or more, or 100% sequence identity) with the Moraxella bovoculi AAX08_00205 Cas12a protein amino acid sequence depicted in FIG. 6. In some cases, a suitable type V CRISPR/Cas effector protein comprises an amino acid sequence having 20% or more sequence identity (e.g., 30% or more, 40% or more, 50% or more, 60% or more, 70% or more, 80% or more, 85% or more, 90% or more, 95% or more, 97% or more, 98% or more, 99% or more, or 100% sequence identity) with the Moraxella bovoculi AAX11_00205 Cas12a protein amino acid sequence depicted in FIG. 6. In some cases, a suitable type V CRISPR/Cas effector protein comprises an amino acid sequence having 20% or more sequence identity (e.g., 30% or more, 40% or more, 50% or more, 60% or more, 70% or more, 80% or more, 85% or more, 90% or more, 95% or more, 97% or more, 98% or more, 99% or more, or 100% sequence identity) with the Thiomicrospira sp.XSS Cas12a protein amino acid sequence depicted in FIG. 6. In some cases, a suitable type V CRISPR/Cas effector protein comprises an amino acid sequence having 20% or more sequence identity (e.g., 30% or more, 40% or more, 50% or more, 60% or more, 70% or more, 80% or more, 85% or more, 90% or more, 95% or more, 97% or more, 98% or more, 99% or more, or 100% sequence identity) with the Butyrivibrio sp. NC3005 Cas12a protein amino acid sequence depicted in FIG. 6. In some cases, a suitable type V CRISPR/Cas effector protein comprises an amino acid sequence having 20% or more sequence identity (e.g., 30% or more, 40% or more, 50% or more, 60% or more, 70% or more, 80% or more, 85% or more, 90% or more, 95% or more, 97% or more, 98% or more, 99% or more, or 100% sequence identity) with the AACCas12b amino acid sequence depicted in FIG. 6.

[0057] In some cases, a type V CRISPR/Cas effector protein comprises an amino acid sequence having 20% or more sequence identity (e.g., 30% or more, 40% or more, 50% or more, 60% or more, 70% or more, 80% or more, 85% or more, 90% or more, 95% or more, 97% or more, 98% or more, 99% or more, or 100% sequence identity) with a Cas12b protein (e.g., a Cas12b protein depicted in FIG. 6). For example, in some cases, a type V CRISPR/Cas effector protein comprises an amino acid sequence having 50% or more sequence identity (e.g., 60% or more, 70% or more, 80% or more, 85% or more, 90% or more, 95% or more, 97% or more, 98% or more, 99% or more, or 100% sequence identity) with a Cas12b protein (e.g., a Cas12b protein depicted in FIG. 6). In some cases, a type V CRISPR/Cas effector protein comprises an amino acid sequence having 80% or more sequence identity (e.g., 85% or more, 90% or more, 95% or more, 97% or more, 98% or more, 99% or more, or 100% sequence identity) with a Cas12b protein (e.g., a Cas12b protein depicted in FIG. 6). In some cases, a type V CRISPR/Cas effector protein comprises an amino acid sequence having 90% or more sequence identity (e.g., 95% or more, 97% or more, 98% or more, 99% or more, or 100% sequence identity) with a Cas12b protein (e.g., a Cas12b protein depicted in FIG. 6). In some cases, a type V CRISPR/Cas effector protein comprises a Cas12b amino acid sequence depicted in FIG. 6.

[0058] In some cases, a suitable type V CRISPR/Cas effector protein comprises an amino acid sequence having 20% or more sequence identity (e.g., 30% or more, 40% or more, 50% or more, 60% or more, 70% or more, 80% or more, 85% or more, 90% or more, 95% or more, 97% or more, 98% or more, 99% or more, or 100% sequence identity) with the Cas12b amino acid sequence depicted in FIG. 6A.

[0059] In some cases, a suitable type V CRISPR/Cas effector protein comprises an amino acid sequence having 20% or more sequence identity (e.g., 30% or more, 40% or more, 50% or more, 60% or more, 70% or more, 80% or more, 85% or more, 90% or more, 95% or more, 97% or more, 98% or more, 99% or more, or 100% sequence identity) with the Cas12b amino acid sequence depicted in FIG. 6B.

[0060] In some cases, a suitable type V CRISPR/Cas effector protein comprises an amino acid sequence having 20% or more sequence identity (e.g., 30% or more, 40% or more, 50% or more, 60% or more, 70% or more, 80% or more, 85% or more, 90% or more, 95% or more, 97% or more, 98% or more, 99% or more, or 100% sequence identity) with the Cas12b amino acid sequence depicted in FIG. 6C.

[0061] In some cases, a suitable type V CRISPR/Cas effector protein comprises an amino acid sequence having 20% or more sequence identity (e.g., 30% or more, 40% or more, 50% or more, 60% or more, 70% or more, 80% or more, 85% or more, 90% or more, 95% or more, 97% or more, 98% or more, 99% or more, or 100% sequence identity) with the Cas12b amino acid sequence depicted in FIG. 6D.

[0062] In some cases, a suitable type V CRISPR/Cas effector protein comprises an amino acid sequence having 20% or more sequence identity (e.g., 30% or more, 40% or more, 50% or more, 60% or more, 70% or more, 80% or more, 85% or more, 90% or more, 95% or more, 97% or more, 98% or more, 99% or more, or 100% sequence identity) with the Cas12b amino acid sequence depicted in FIG. 6E.

[0063] In some cases, a suitable type V CRISPR/Cas effector protein comprises an amino acid sequence having 20% or more sequence identity (e.g., 30% or more, 40% or more, 50% or more, 60% or more, 70% or more, 80% or more, 85% or more, 90% or more, 95% or more, 97% or more, 98% or more, 99% or more, or 100% sequence identity) with the Cas12b amino acid sequence depicted in FIG. 6F.

[0064] In some cases, a suitable type V CRISPR/Cas effector protein comprises an amino acid sequence having 20% or more sequence identity (e.g., 30% or more, 40% or more, 50% or more, 60% or more, 70% or more, 80% or more, 85% or more, 90% or more, 95% or more, 97% or more, 98% or more, 99% or more, or 100% sequence identity) with the Cas12b amino acid sequence depicted in FIG. 6G.

[0065] In some cases, a suitable type V CRISPR/Cas effector protein comprises an amino acid sequence having 20% or more sequence identity (e.g., 30% or more, 40% or more, 50% or more, 60% or more, 70% or more, 80% or more, 85% or more, 90% or more, 95% or more, 97% or more, 98% or more, 99% or more, or 100% sequence identity) with the Cas12b amino acid sequence depicted in FIG. 6H.

[0066] In some cases, a suitable type V CRISPR/Cas effector protein comprises an amino acid sequence having 20% or more sequence identity (e.g., 30% or more, 40% or more, 50% or more, 60% or more, 70% or more, 80% or more, 85% or more, 90% or more, 95% or more, 97% or more, 98% or more, 99% or more, or 100% sequence identity) with the Cas12b amino acid sequence depicted in FIG. 6I.

[0067] In some cases, a suitable type V CRISPR/Cas effector protein comprises an amino acid sequence having 20% or more sequence identity (e.g., 30% or more, 40% or more, 50% or more, 60% or more, 70% or more, 80% or more, 85% or more, 90% or more, 95% or more, 97% or more, 98% or more, 99% or more, or 100% sequence identity) with the Cas12b amino acid sequence depicted in FIG. 6J.

[0068] In some cases, a suitable type V CRISPR/Cas effector protein comprises an amino acid sequence having 20% or more sequence identity (e.g., 30% or more, 40% or more, 50% or more, 60% or more, 70% or more, 80% or more, 85% or more, 90% or more, 95% or more, 97% or more, 98% or more, 99% or more, or 100% sequence identity) with the Cas12e amino acid sequence depicted in FIG. 7A.

[0069] In some cases, a suitable type V CRISPR/Cas effector protein comprises an amino acid sequence having 20% or more sequence identity (e.g., 30% or more, 40% or more, 50% or more, 60% or more, 70% or more, 80% or more, 85% or more, 90% or more, 95% or more, 97% or more, 98% or more, 99% or more, or 100% sequence identity) with the Cas12e amino acid sequence depicted in FIG. 7B.

[0070] In some cases, a type V CRISPR/Cas effector protein comprises an amino acid sequence having 20% or more sequence identity (e.g., 30% or more, 40% or more, 50% or more, 60% or more, 70% or more, 80% or more, 85% or more, 90% or more, 95% or more, 97% or more, 98% or more, 99% or more, or 100% sequence identity) with a Cas12, C2c4, C2c8, C2c5, C2c10, or C2c9 protein. For example, in some cases, a type V CRISPR/Cas effector protein comprises an amino acid sequence having 50% or more sequence identity (e.g., 60% or more, 70% or more, 80% or more, 85% or more, 90% or more, 95% or more, 97% or more, 98% or more, 99% or more, or 100% sequence identity) with a Cas12, C2c4, C2c8, C2c5, C2c10, or C2c9 protein. In some cases, a type V CRISPR/Cas effector protein comprises an amino acid sequence having 80% or more sequence identity (e.g., 85% or more, 90% or more, 95% or more, 97% or more, 98% or more, 99% or more, or 100% sequence identity) with a Cas12, C2c4, C2c8, C2c5, C2c10, or C2c9 protein. In some cases, a type V CRISPR/Cas effector protein comprises an amino acid sequence having 90% or more sequence identity (e.g., 95% or more, 97% or more, 98% or more, 99% or more, or 100% sequence identity) with a Cas12, C2c4, C2c8, C2c5, C2c10, or C2c9 protein. In some cases, a type V CRISPR/Cas effector protein comprises a Cas12, C2c4, C2c8, C2c5, C2c10, or C2c9 amino acid sequence.

[0071] In some cases, a type V CRISPR/Cas effector protein comprises an amino acid sequence having 20% or more sequence identity (e.g., 30% or more, 40% or more, 50% or more, 60% or more, 70% or more, 80% or more, 85% or more, 90% or more, 95% or more, 97% or more, 98% or more, 99% or more, or 100% sequence identity) with a Cas12, C2c4, C2c8, or C2c5 protein. For example, In some cases, a type V CRISPR/Cas effector protein comprises an amino acid sequence having 50% or more sequence identity (e.g., 60% or more, 70% or more, 80% or more, 85% or more, 90% or more, 95% or more, 97% or more, 98% or more, 99% or more, or 100% sequence identity) with a Cas12, C2c4, C2c8, or C2c5 protein. In some cases, a type V CRISPR/Cas effector protein comprises an amino acid sequence having 80% or more sequence identity (e.g., 85% or more, 90% or more, 95% or more, 97% or more, 98% or more, 99% or more, or 100% sequence identity) with a Cas12, C2c4, C2c8, or C2c5 protein. In some cases, a type V CRISPR/Cas effector protein comprises an amino acid sequence having 90% or more sequence identity (e.g., 95% or more, 97% or more, 98% or more, 99% or more, or 100% sequence identity) with a Cas12, C2c4, C2c8, or C2c5protein. In some cases, a type V CRISPR/Cas effector protein comprises a Cas12, C2c4, C2c8, or C2c5 amino acid sequence.

[0072] In some cases, a type V CRISPR/Cas effector protein comprises an amino acid sequence having 20% or more sequence identity (e.g., 30% or more, 40% or more, 50% or more, 60% or more, 70% or more, 80% or more, 85% or more, 90% or more, 95% or more, 97% or more, 98% or more, 99% or more, or 100% sequence identity) with a C2c4, C2c8, or C2c5 protein. For example, in some cases, a type V CRISPR/Cas effector protein comprises an amino acid sequence having 50% or more sequence identity (e.g., 60% or more, 70% or more, 80% or more, 85% or more, 90% or more, 95% or more, 97% or more, 98% or more, 99% or more, or 100% sequence identity) with a C2c4, C2c8, or C2c5 protein. In some cases, a type V CRISPR/Cas effector protein comprises an amino acid sequence having 80% or more sequence identity (e.g., 85% or more, 90% or more, 95% or more, 97% or more, 98% or more, 99% or more, or 100% sequence identity) with a C2c4, C2c8, or C2c5 protein. In some cases, a type V CRISPR/Cas effector protein comprises an amino acid sequence having 90% or more sequence identity (e.g., 95% or more, 97% or more, 98% or more, 99% or more, or 100% sequence identity) with a C2c4, C2c8, or C2c5 protein. In some cases, a type V CRISPR/Cas effector protein comprises a C2c4, C2c8, or C2c5 amino acid sequence.

[0073] In some cases, a type V CRISPR/Cas effector protein comprises an amino acid sequence having 20% or more sequence identity (e.g., 30% or more, 40% or more, 50% or more, 60% or more, 70% or more, 80% or more, 85% or more, 90% or more, 95% or more, 97% or more, 98% or more, 99% or more, or 100% sequence identity) with a Cas12, C2c10, or C2c9 protein. For example, In some cases, a type V CRISPR/Cas effector protein comprises an amino acid sequence having 50% or more sequence identity (e.g., 60% or more, 70% or more, 80% or more, 85% or more, 90% or more, 95% or more, 97% or more, 98% or more, 99% or more, or 100% sequence identity) with a Cas12, C2c10, or C2c9 protein. In some cases, a type V CRISPR/Cas effector protein comprises an amino acid sequence having 80% or more sequence identity (e.g., 85% or more, 90% or more, 95% or more, 97% or more, 98% or more, 99% or more, or 100% sequence identity) with a Cas12, C2c10, or C2c9 protein. In some cases, a type V CRISPR/Cas effector protein comprises an amino acid sequence having 90% or more sequence identity (e.g., 95% or more, 97% or more, 98% or more, 99% or more, or 100% sequence identity) with a Cas12, C2c10, or C2c9 protein. In some cases, a type V CRISPR/Cas effector protein comprises a Cas12, C2c10, or C2c9 amino acid sequence.

[0074] In some cases, a type V CRISPR/Cas effector protein comprises an amino acid sequence having 20% or more sequence identity (e.g., 30% or more, 40% or more, 50% or more, 60% or more, 70% or more, 80% or more, 85% or more, 90% or more, 95% or more, 97% or more, 98% or more, 99% or more, or 100% sequence identity) with a C2c10 or C2c9 protein. For example, In some cases, a type V CRISPR/Cas effector protein comprises an amino acid sequence having 50% or more sequence identity (e.g., 60% or more, 70% or more, 80% or more, 85% or more, 90% or more, 95% or more, 97% or more, 98% or more, 99% or more, or 100% sequence identity) with a C2c10 or C2c9 protein. In some cases, a type V CRISPR/Cas effector protein comprises an amino acid sequence having 80% or more sequence identity (e.g., 85% or more, 90% or more, 95% or more, 97% or more, 98% or more, 99% or more, or 100% sequence identity) with a C2c10 or C2c9 protein. In some cases, a type V CRISPR/Cas effector protein comprises an amino acid sequence having 90% or more sequence identity (e.g., 95% or more, 97% or more, 98% or more, 99% or more, or 100% sequence identity) with a C2c10 or C2c9 protein. In some cases, a type V CRISPR/Cas effector protein comprises a C2c10 or C2c9 amino acid sequence.

[0075] In some cases, a subject type V CRISPR/Cas effector protein (e.g., a Cas12 protein such as Cas12a, Cas12b, Cas12c, Cas12d, Cas12e) is fused to (conjugated to) a heterologous polypeptide. In some cases, a heterologous polypeptide (a fusion partner) provides for subcellular localization, i.e., the heterologous polypeptide contains a subcellular localization sequence (e.g., a nuclear localization signal (NLS) for targeting to the nucleus, a sequence to keep the fusion protein out of the nucleus, e.g., a nuclear export sequence (NES), a sequence to keep the fusion protein retained in the cytoplasm, a mitochondrial localization signal for targeting to the mitochondria, a chloroplast localization signal for targeting to a chloroplast, an endoplasmic reticulum (ER) retention signal, and the like). In some cases, a type V CRISPR/Cas effector protein (e.g., a Cas12 protein) does not include a NLS so that the protein is not targeted to the nucleus (which can be advantageous, e.g., when it desirable to cleave non-target ssDNAs in the cytosol). In some cases, the heterologous polypeptide can provide a tag (i.e., the heterologous polypeptide is a detectable label) for ease of tracking and/or purification (e.g., a fluorescent protein, e.g., a green fluorescent protein (GFP), a yellow fluorescent protein (YFP), a red fluorescent protein (RFP), a cyan fluorescent protein (CFP), mCherry, tdTomato, and the like; a histidine tag, e.g., a 6×His tag; a hemagglutinin (HA) tag; a FLAG tag; a Myc tag; and the like).

[0076] In some cases, a type V CRISPR/Cas effector protein (e.g., a Cas12 protein such as Cas12a, Cas12b, Cas12c, Cas12d, Cas12e) includes (is fused to) a nuclear localization signal (NLS) (e.g., in some cases 2 or more, 3 or more, 4 or more, or 5 or more NLSs). Thus, in some cases, a type V CRISPR/Cas effector protein includes one or more NLSs (e.g., 2 or more, 3 or more, 4 or more, or 5 or more NLSs). In some cases, one or more NLSs (2 or more, 3 or more, 4 or more, or 5 or more NLSs) are positioned at or near (e.g., within 50 amino acids of) the N-terminus and/or the C-terminus. In some cases, one or more NLSs (2 or more, 3 or more, 4 or more, or 5 or more NLSs) are positioned at or near (e.g., within 50 amino acids of) the N-terminus. In some cases, one or more NLSs (2 or more, 3 or more, 4 or more, or 5 or more NLSs) are positioned at or near (e.g., within 50 amino acids of) the C-terminus. In some cases, one or more NLSs (3 or more, 4 or more, or 5 or more NLSs) are positioned at or near (e.g., within 50 amino acids of) both the N-terminus and the C-terminus. In some cases, an NLS is positioned at the N-terminus and an NLS is positioned at the C-terminus.

[0077] In some cases, a type V CRISPR/Cas effector protein (e.g., a Cas12 protein such as Cas12a, Cas12b, Cas12c, Cas12d, Cas12e) includes (is fused to) between 1 and 10 NLSs (e.g., 1-9, 1-8, 1-7, 1-6, 1-5, 2-10, 2-9, 2-8, 2-7, 2-6, or 2-5 NLSs). In some cases, a type V CRISPR/Cas effector protein includes (is fused to) between 2 and 5 NLSs (e.g., 2-4, or 2-3 NLSs).

[0078] Non-limiting examples of NLSs include an NLS sequence derived from: the NLS of the SV40 virus large T-antigen, having the amino acid sequence PKKKRKV (SEQ ID NO:1); the NLS from nucleoplasmin (e.g., the nucleoplasmin bipartite NLS with the sequence KRPAATKKAGQAKKKK (SEQ ID NO:2)); the c-myc NLS having the amino acid sequence PAAKRVKLD (SEQ ID NO:3) or RQRRNELKRSP (SEQ ID NO:4); the hRNPA1 M9 NLS having the sequence NQSSNFGPMKGGNFGGRSSGPYGGGGQYFAKPRNQGGY (SEQ ID NO:5); the sequence RMRIZFKNKGKDTAELRRRRVEVSVELRKAKKDEQILKRRNV (SEQ ID NO:6) of the IBB domain from importin-alpha; the sequences VSRKRPRP (SEQ ID NO:7) and PPKKARED (SEQ ID NO:8) of the myoma T protein; the sequence PQPKKKPL (SEQ ID NO:9) of human p53; the sequence SALIKKKKKMAP (SEQ ID NO:10) of mouse c-abl IV; the sequences DRLRR (SEQ ID NO:11) and PKQKKRK (SEQ ID NO:12) of the influenza virus NS1; the sequence RKLKKKIKKL (SEQ ID NO:13) of the Hepatitis virus delta antigen; the sequence REKKKFLKRR (SEQ ID NO:14) of the mouse Mxl protein; the sequence KRKGDEVDGVDEVAKKKSKK (SEQ ID NO:15) of the human poly(ADP-ribose) polymerase; and the sequence RKCLQAGMNLEARKTKK (SEQ ID NO:16) of the steroid hormone receptors (human) glucocorticoid. In general, NLS (or multiple NLSs) are of sufficient strength to drive accumulation of the protein in a detectable amount in the nucleus of a eukaryotic cell. Detection of accumulation in the nucleus may be performed by any suitable technique.

### Protospacer Adjacent Motif (PAM)

[0079] A Type V CRISPR/Cas effector protein binds to target DNA at a target sequence defined by the region of complementarity between the DNA-targeting RNA and the target DNA. As is the case for many CRISPR/Cas endonucleases, site-specific binding (and/or cleavage) of a double stranded target DNA occurs at locations determined by both (i) base-pairing complementarity between the guide RNA and the target DNA; and (ii) a short motif (referred to as the protospacer adjacent motif (PAM)) in the target DNA.

[0080] In some cases, the PAM for a Type V CRISPR/Cas effector protein is immediately 5′ of the target sequence (e.g., of the non-complementary strand of the target DNA—the complementary strand hybridizes to the guide sequence of the guide RNA while the non-complementary strand does not directly hybridize with the guide RNA and is the reverse complement of the non-complementary strand). In some cases (e.g., when Cas12a or Cas12b as described herein is used), the PAM sequence is 5′-TTN-3′. In some cases, the PAM sequence is 5′-TTTN-3.′ (e.g., see FIG. 6V).

[0081] In some cases, different Type V CRISPR/Cas effector proteins (i.e., Type V CRISPR/Cas effector proteins from various species) may be advantageous to use in the various provided methods in order to capitalize on a desired feature (e.g., specific enzymatic characteristics of different Type V CRISPR/Cas effector proteins). Type V CRISPR/Cas effector proteins from different species may require different PAM sequences in the target DNA. Thus, for a particular Type V CRISPR/Cas effector protein of choice, the PAM sequence requirement may be different than the 5′-TTN-3′ or 5′-TTTN-3′ sequence described above. Various methods (including in silico and/or wet lab methods) for identification of the appropriate PAM sequence are known in the art and are routine, and any convenient method can be used.

### Guide RNA

[0082] A nucleic acid molecule (e.g., a natural crRNA) that binds to a type V CRISPR/Cas effector protein (e.g., a Cas12 protein such as Cas12a, Cas12b, Cas12c, Cas12d, Cas12e), forming a ribonucleoprotein complex (RNP), and targets the complex to a specific target sequence within a target DNA is referred to herein as a “guide RNA.” It is to be understood that in some cases, a hybrid DNA/RNA can be made such that a guide RNA includes DNA bases in addition to RNA bases—but the term “guide RNA” is still used herein to encompass such hybrid molecules. A subject guide RNA includes a guide sequence (also referred to as a “spacer”)(that hybridizes to target sequence of a target DNA) and a constant region (e.g., a region that is adjacent to the guide sequence and binds to the type V CRISPR/Cas effector protein). A “constant region” can also be referred to herein as a “protein-binding segment.” In some cases, e.g., for Cas12a, the constant region is 5′ of the guide sequence.

### Guide Sequence

[0083] The guide sequence has complementarity with (hybridizes to) a target sequence of the target DNA. In some cases, the guide sequence is 15-28 nucleotides (nt) in length (e.g., 15-26, 15-24, 15-22, 15-20, 15-18, 16-28, 16-26, 16-24, 16-22, 16-20, 16-18, 17-26, 17-24, 17-22, 17-20, 17-18, 18-26, 18-24, or 18-22 nt in length). In some cases, the guide sequence is 18-24 nucleotides (nt) in length. In some cases, the guide sequence is at least 15 nt long (e.g., at least 16, 18, 20, or 22 nt long). In some cases, the guide sequence is at least 17 nt long. In some cases, the guide sequence is at least 18 nt long. In some cases, the guide sequence is at least 20 nt long.

[0084] In some cases, the guide sequence has 80% or more (e.g., 85% or more, 90% or more, 95% or more, or 100% complementarity) with the target sequence of the target DNA. In some cases, the guide sequence is 100% complementary to the target sequence of the target DNA. In some cases, the target DNA includes at least 15 nucleotides (nt) of complementarity with the guide sequence of the guide RNA.

[0085] Guide sequences suitable for use in connection with detection of viral pathogens can be designed based on the nucleotide sequence of a viral pathogen. Guide sequences suitable for use in connection with detection of bacterial pathogens can be designed based on the nucleotide sequence of a bacterial pathogen. Guide sequences suitable for use in connection with detection of fungal pathogens can be designed based on the nucleotide sequence of a fungal pathogen. Guide sequences suitable for use in connection with detection of protozoan pathogens can be designed based on the nucleotide sequence of a protozoan pathogen. Guide sequences suitable for use in connection with detection of antibiotic resistance genes can be designed based on the nucleotide sequence of an antibiotic resistance gene.

### Constant Region

[0086] Examples of constant regions for guide RNAs that can be used with a type V CRISPR/Cas effector protein (e.g., a Cas12 protein such as Cas12a, Cas12b, Cas12c, Cas12d, Cas12e) are presented in FIG. 6.

[0087] In some cases, a subject guide RNA includes a nucleotide sequence having 70% or more identity (e.g., 80% or more, 85% or more, 90% or more, 95% or more, 98% or more, 99% or more, or 100% identity) with any one of the crRNA repeat sequences set forth in FIG. 6. In some cases, a subject guide RNA includes a nucleotide sequence having 90% or more identity (e.g., 95% or more, 98% or more, 99% or more, or 100% identity) with any one of the crRNA repeat sequences set forth in FIG. 6. In some cases, a subject guide RNA includes a crRNA nucleotide sequence set forth in FIG. 6.

[0088] In some cases, the guide RNA includes a double stranded RNA duplex (dsRNA duplex). In some cases, a guide RNA includes a dsRNA duplex with a length of from 2 to 12 bp (e.g., from 2 to 10 bp, 2 to 8 bp, 2 to 6 bp, 2 to 5 bp, 2 to 4 bp, 3 to 12 bp, 3 to 10 bp, 3 to 8 bp, 3 to 6 bp, 3 to 5 bp, 3 to 4 bp, 4 to 12 bp, 4 to 10 bp, 4 to 8 bp, 4 to 6 bp, or 4 to 5 bp). In some cases, a guide RNA includes a dsRNA duplex that is 2 or more bp in length (e.g., 3 or more, 4 or more, 5 or more, 6 or more, or 7 or more bp in length). In some cases, a guide RNA includes a dsRNA duplex that is longer than the dsRNA duplex of a corresponding wild type guide RNA. In some cases, a guide RNA includes a dsRNA duplex that is shorter than the dsRNA duplex of a corresponding wild type guide RNA.

[0089] In some cases, the constant region of a guide RNA is 15 or more nucleotides (nt) in length (e.g., 18 or more, 20 or more, 21 or more, 22 or more, 23 or more, 24 or more, 25 or more, 26 or more, 27 or more, 28 or more, 29 or more, 30 or more, 31 or more nt, 32 or more, 33 or more, 34 or more, or 35 or more nt in length). In some cases, the constant region of a guide RNA is 18 or more nt in length.

[0090] In some cases, the constant region of a guide RNA has a length in a range of from 12 to 100 nt (e.g., from 12 to 90, 12 to 80, 12 to 70, 12 to 60, 12 to 50, 12 to 40, 15 to 100, 15 to 90, 15 to 80, 15 to 70, 15 to 60, 15 to 50, 15 to 40, 20 to 100, 20 to 90, 20 to 80, 20 to 70, 20 to 60, 20 to 50, 20 to 40, 25 to 100, 25 to 90, 25 to 80, 25 to 70, 25 to 60, 25 to 50, 25 to 40, 28 to 100, 28 to 90, 28 to 80, 28 to 70, 28 to 60, 28 to 50, 28 to 40, 29 to 100, 29 to 90, 29 to 80, 29 to 70, 29 to 60, 29 to 50, or 29 to 40 nt). In some cases, the constant region of a guide RNA has a length in a range of from 28 to 100 nt. In some cases, the region of a guide RNA that is 5′ of the guide sequence has a length in a range of from 28 to 40 nt.

[0091] In some cases, the constant region of a guide RNA is truncated relative to (shorter than) the corresponding region of a corresponding wild type guide RNA. In some cases, the constant region of a guide RNA is extended relative to (longer than) the corresponding region of a corresponding wild type guide RNA. In some cases, a subject guide RNA is 30 or more nucleotides (nt) in length (e.g., 34 or more, 40 or more, 45 or more, 50 or more, 55 or more, 60 or more, 65 or more, 70 or more, or 80 or more nt in length). In some cases, the guide RNA is 35 or more nt in length.

### Adapter Nucleic Acids

[0092] As noted above, a method of the present disclosure involves contacting the sample with a type V CRISPR/Cas effector protein and one or more guide RNAs, where the contacting step generates a PAM-distal cleavage product comprising a 5′ overhang; and ligating a double-stranded nucleic acid adapter to the cleavage product, to generate a ligation product. The double-stranded nucleic acid adapter comprises a 5′ overhang that comprises a stretch of from 3 to 15 contiguous nucleotides that are complementary to a contiguous stretch of nucleotides of the same length in the 5′ overhang of the PAM-distal cleavage product. The ligation product includes the target DNA, which can be sequenced.

[0093] An adapter nucleic acid includes any nucleic acid having a sequence, at least a portion of which is known, that can be joined to a target polynucleotide. Adapter nucleic acids can comprise DNA, RNA, nucleotide analogues, non-canonical nucleotides, labeled nucleotides, modified nucleotides, or combinations thereof. Adapter nucleic acids can be single-stranded, double-stranded, or partial duplex. In general, a partial-duplex adapter comprises one or more single-stranded regions and one or more double-stranded regions. A partial-duplex adapter can be described as a “double-stranded nucleic acid adapter comprising a 5′ overhang” (i.e., a 5′ single-stranded overhang).

[0094] An adapter nucleic acid for use in a method of the present disclosure is double stranded, and comprises a 5′ overhang that comprises a stretch of from 3 to 15 contiguous nucleotides that are complementary to a contiguous stretch of nucleotides of the same length in the 5′ overhang of the PAM-distal cleavage product. In some cases, the 5′ overhang has a length of from 3 nucleotides to 20 nucleotides; for example, the 5′ overhang of the adapter nucleic acid can have a length of 3 nucleotides (nt), 4 nt, 5 nt, 6 nt, 7 nt, 8 nt, 9 nt, 10 nt, 11 nt, 12 nt, 13 nt, 14 nt, 15 nt, 16 nt, 17 nt, 18 nt, 19 nt, or 20 nt. In some cases, the 5′ overhang has a length of from 8 nucleotides to 10 nucleotides. In some cases, the 5′ overhang has a length of 8 nucleotides. In some cases, the 5′ overhang has a length of 9 nucleotides. In some cases, the 5′ overhang has a length of 10 nucleotides. The 5′ overhang of the adapter nucleic acid can comprise a stretch of 3, 4, 5, 6, 7, 8, 9, 10, 11, 12, 13, 14, or 15 contiguous nucleotides that are complementary to a contiguous stretch of nucleotides of the same length in the 5′ overhang of the PAM-distal cleavage product. In some cases, the 5′ overhang of the adapter nucleic acid comprises a stretch of from 5 contiguous nucleotides to 10 contiguous nucleotides that are complementary to a contiguous stretch of nucleotides of the same length in the 5′ overhang of the PAM-distal cleavage product. In some cases, the 5′ overhang of the adapter nucleic acid comprises a stretch of from 8 contiguous nucleotides to 10 contiguous nucleotides that are complementary to a contiguous stretch of nucleotides of the same length in the 5′ overhang of the PAM-distal cleavage product. In some cases, the 5′ overhang of the adapter nucleic acid has a length of from 8 nucleotides to 10 nucleotides; and comprises a stretch of from 8 contiguous nucleotides to 10 contiguous nucleotides that are complementary to a contiguous stretch of nucleotides of the same length in the 5′ overhang of the PAM-distal cleavage product.

[0095] The total length of the adapter nucleic acid (including the 5′ overhang) can be from about 10 nucleotides to 100 nucleotides. For example, the total length of the adapter nucleic acid (including the 5′ overhang) can be from about 10 nucleotides (nt) to 15 nt, from 15 nt to 20 nt, from 20 nt to 25 nt, from 25 nt to 30 nt, from 30 nt to 40 nt, from 40 nt to 50 nt, from 50 nt to 60 nt, from 60 nt to 70 nt, from 70 nt to 80 nt, from 80 nt to 90 nt, or from 90 nt to 100 nt. In some cases, the total length of the adapter nucleic acid (including the 5′ overhang) is from about 10 nt to about 25 nt. In some cases, the total length of the adapter nucleic acid (including the 5′ overhang) is from about 15 nt to about 20 nt. In some cases, the total length of the adapter nucleic acid (including the 5′ overhang) is from about 15 nt to about 25 nt. In some cases, the total length of the adapter nucleic acid (including the 5′ overhang) is from about 15 nt to about 30 nt. In some cases, the total length of the adapter nucleic acid (including the 5′ overhang) is from about 25 nt to about 30 nt. In some cases, the total length of the adapter nucleic acid (including the 5′ overhang) is from about 20 nt to about 50 nt. In some cases, the total length of the adapter nucleic acid (including the 5′ overhang) is from about 25 nt to about 50 nt.

[0096] In some cases, the adapter nucleic acid comprises, in addition to the 5′ overhang discussed above, a 3′ overhang. In some cases, the adapter nucleic acid comprises, in addition to the 5′ overhang discussed above, a 3′ adenosine overhang.

[0097] The adapter nucleic acid is ligated to the PAM-distal cleavage product, to generate a ligation product comprising the adapter and the PAM-distal cleavage product. In some cases, the ligation product is further ligated to one or more additional adapters, e.g., an adapter that provides a bar code, an adapter that allows for next-generation sequencing, and the like. For example, the one or more additional adapters can include a nucleotide sequence specific for coupling to a sequencing platform; such an adapter may also include a barcode sequence. In some cases, the additional adapter comprises a nucleotide sequence that is at least 70% identical to a support-bound oligonucleotide conjugated to a solid support; in some cases, the solid support is coupled to a sequencing platform. In some cases, the additional adapter comprises a binding site for a sequencing primer. Ligation of various adapters to a type V CRISPR/Cas effector polypeptide cleavage product is depicted schematically in FIG. 3.

[0098] Double-stranded adapters can comprise two separate oligonucleotides hybridized to one another (also referred to as an “oligonucleotide duplex”), and hybridization may leave one or more blunt ends, one or more 3′ overhangs, one or more 5′ overhangs, one or more bulges resulting from mismatched and/or unpaired nucleotides, or any combination of these. In some embodiments, a single-stranded adapter comprises two or mores sequences that are able to hybridize with one another. When two such hybridizable sequences are contained in a single-stranded adapter, hybridization yields a hairpin structure (hairpin adapter). When two hybridized regions of an adapter are separated from one another by a non-hybridized region, a “bubble” structure results. Adapters comprising a bubble structure can consist of a single adapter oligonucleotide comprising internal hybridizations, or may comprise two or more adapter oligonucleotides hybridized to one another. Internal sequence hybridization, such as between two hybridizable sequences in an adapter, can produce a double-stranded structure in a single-stranded adapter oligonucleotide. Adapters of different kinds can be used in combination, such as a hairpin adapter and a double-stranded adapter, or adapters of different sequences. Hybridizable sequences in a hairpin adapter may or may not include one or both ends of the oligonucleotide. When neither of the ends are included in the hybridizable sequences, both ends are “free” or “overhanging.” When only one end is hybridizable to another sequence in the adapter, the other end forms an overhang, such as a 3′ overhang or a 5′ overhang. When both the 5′-terminal nucleotide and the 3′-terminal nucleotide are included in the hybridizable sequences, such that the 5′-terminal nucleotide and the 3′-terminal nucleotide are complementary and hybridize with one another, the end is referred to as “blunt.”

[0099] Adapters can contain one or more of a variety of sequence elements, including but not limited to, one or more amplification primer annealing sequences or complements thereof, one or more sequencing primer annealing sequences or complements thereof, one or more barcode sequences, one or more common sequences shared among multiple different adapters or subsets of different adapters, one or more restriction enzyme recognition sites, one or more overhangs complementary to one or more target polynucleotide overhangs, one or more probe binding sites (e.g. for attachment to a sequencing platform, such as a flow cell for massive parallel sequencing, such as developed by Illumina, Inc.), one or more random or near-random sequences (e.g. one or more nucleotides selected at random from a set of two or more different nucleotides at one or more positions, with each of the different nucleotides selected at one or more positions represented in a pool of adapters comprising the random sequence), and combinations thereof. Two or more sequence elements can be non-adjacent to one another (e.g. separated by one or more nucleotides), adjacent to one another, partially overlapping, or completely overlapping. For example, an amplification primer annealing sequence can also serve as a sequencing primer annealing sequence. Sequence elements can be located at or near the 3′ end, at or near the 5′ end, or in the interior of the adapter oligonucleotide. When an adapter oligonucleotide is capable of forming secondary structure, such as a hairpin, sequence elements can be located partially or completely outside the secondary structure, partially or completely inside the secondary structure, or in between sequences participating in the secondary structure. For example, when an adapter oligonucleotide comprises a hairpin structure, sequence elements can be located partially or completely inside or outside the hybridizable sequences (the “stem”), including in the sequence between the hybridizable sequences (the “loop”). In some cases, the first adapter oligonucleotides in a plurality of first adapter oligonucleotides having different barcode sequences comprise a sequence element common among all first adapter oligonucleotides in the plurality. In some cases, all second adapter oligonucleotides comprise a sequence element common among all second adapter oligonucleotides that is different from the common sequence element shared by the first adapter oligonucleotides. A difference in sequence elements can be any such that least a portion of different adapters do not completely align, for example, due to changes in sequence length, deletion or insertion of one or more nucleotides, or a change in the nucleotide composition at one or more nucleotide positions (such as a base change or base modification). In some cases, an adapter oligonucleotide comprises a 5′ overhang, a 3′ overhang, or both that is complementary to one or more target polynucleotides. Complementary overhangs can be one or more nucleotides in length, including but not limited to 1, 2, 3, 4, 5, 6, 7, 8, 9, 10, 11, 12, 13, 14, 15, or more nucleotides in length. Complementary overhangs may comprise a fixed sequence. Complementary overhangs may comprise a random sequence of one or more nucleotides, such that one or more nucleotides are selected at random from a set of two or more different nucleotides at one or more positions, with each of the different nucleotides selected at one or more positions represented in a pool of adapters with complementary overhangs comprising the random sequence. In some cases, an adapter overhang is complementary to a target polynucleotide overhang produced by restriction endonuclease digestion. In some embodiments, an adapter overhang consists of an adenine or a thymine.

[0100] The terms “joining” and “ligation” as used herein, with respect to two polynucleotides, such as an adapter nucleic acid and a PAM-distal cleavage product, refers to the covalent attachment of two separate polynucleotides to produce a single larger polynucleotide with a contiguous backbone. Methods for joining two polynucleotides are known in the art, and include without limitation, enzymatic and non-enzymatic (e.g. chemical) methods. Examples of ligation reactions that are non-enzymatic include the non-enzymatic ligation techniques described in U.S. Pat. Nos. 5,780,613 and 5,476,930, which are herein incorporated by reference. In some cases, an adapter nucleic acid is joined to a target polynucleotide (e.g., a PAM-distal cleavage product) by a ligase, for example a DNA ligase or RNA ligase. Multiple ligases, each having characterized reaction conditions, are known in the art, and include, without limitation NAD+-dependent ligases including tRNA ligase, Taq DNA ligase, Thermus filiformis DNA ligase, Escherichia coli DNA ligase, Tth DNA ligase, Thermus scotoductus DNA ligase (I and II), thermostable ligase, Ampligase thermostable DNA ligase, VanC-type ligase, 9° N DNA Ligase, Tsp DNA ligase, and novel ligases discovered by bioprospecting; ATP-dependent ligases including T4 RNA ligase, T4 DNA ligase, T3 DNA ligase, T7 DNA ligase, Pfu DNA ligase, DNA ligase 1, DNA ligase III, DNA ligase IV, and novel ligases discovered by bioprospecting; and wild-type, mutant isoforms, and genetically engineered variants thereof.

[0101] Ligation can be between polynucleotides having hybridizable sequences, such as complementary overhangs. Ligation can also be between two blunt ends. Generally, a 5′ phosphate is utilized in a ligation reaction. The 5′ phosphate can be provided by the target polynucleotide, the adapter oligonucleotide, or both. 5′ phosphates can be added to or removed from polynucleotides to be joined, as needed. Methods for the addition or removal of 5′ phosphates are known in the art, and include without limitation enzymatic and chemical processes. Enzymes useful in the addition and/or removal of 5′ phosphates include kinases, phosphatases, and polymerases. In some cases, both of the two ends joined in a ligation reaction (e.g. an adapter end and a target polynucleotide end) provide a 5′ phosphate, such that two covalent linkages are made in joining the two ends. In some cases, only one of the two ends joined in a ligation reaction (e.g. only one of an adapter end and a target polynucleotide end) provides a 5′ phosphate, such that only one covalent linkage is made in joining the two ends. In some cases, only one strand at one or both ends of a target polynucleotide is joined to an adapter nucleic acid. In some cases, both strands at one or both ends of a target polynucleotide (e.g., a PAM-distal cleavage product) are joined to an adapter nucleic acid. In some cases, 3′ phosphates are removed prior to ligation. In some cases, an adapter nucleic acid is added to only one end of a target polynucleotide (e.g., a PAM-distal cleavage product). When both strands at both ends are joined to an adapter oligonucleotide, joining can be followed by a cleavage reaction that leaves a 5′ overhang that can serve as a template for the extension of the corresponding 3′ end, which 3′ end may or may not include one or more nucleotides derived from the adapter oligonucleotide. In some cases, a target polynucleotide (e.g., a PAM-distal cleavage product) is joined to a first adapter nucleic acid on one end and a second adapter oligonucleotide on the other end. In some cases, two ends of a target polynucleotide are joined to the opposite ends of a single adapter oligonucleotide. In some cases, the target polynucleotide and the adapter nucleic acid to which it is joined comprise blunt ends. In some cases, separate ligation reactions are carried out for each sample, using a different first adapter nucleic acid comprising at least one barcode sequence for each sample, such that no barcode sequence is joined to the target polynucleotides of more than one sample. A target polynucleotide that has an adapter nucleic acid joined to it is considered “tagged” by the joined adapter.

[0102] In some cases, the primers are spiked primers, as described in Example 2. In some cases, a method of the present disclosure comprises use of metagenomic sequencing with spiked primer enrichment (MSSPE), as described in Example 2.

### Amplification

[0103] As noted above, a sample comprising a target DNA can be subjected to one or more nucleic acid amplification steps before the contacting step. The sample can be subjected to one or more amplification steps prior to the contacting step, with primers that provide for amplification of nucleic acids of, e.g., specific pathogens, categories of pathogens, two or more different pathogens, or two or more different categories of pathogens.

### Oligonucleotide Primers

[0104] A sample comprising a target DNA can be amplified using a method comprising contacting the sample with one or more pairs of nucleic acid primers. For example, in some cases, the sample is contacted with a single pair of nucleic acid primers (also referred to herein as “oligonucleotide primers” or, simply, “primers”). In some cases, the sample is contacted with two or more different pairs of primers; e.g., the sample is contacted with 2, 3, 4, 5, 6, 7, 8, 9, or 10, or more than 10 (e.g., from 10 to 15, from 15 to 20, from 20 to 25, or from 25 to 30), different pairs of primers. The term “different pairs of primers” refers to primer pairs that differ from one another in nucleotide sequence. For example, a first primer pair differs from a second primer pair in nucleotide sequence, where the first and second primer pairs are “different pairs of primers.”

[0105] In some cases, the two or more different primer pairs provide for amplification of DNA from two or more different pathogens. In some cases, the two or more different primer pairs provide for amplification of DNA from two or more (e.g., 2, 3, 4, 5, 6, 7, 8, 9, 10, or more than 10 (e.g., from 10 to 15, from 15 to 20, from 20 to 25, or from 25 to 30)), different pathogens. In some cases, the two or more pathogens are viral pathogens. In some cases, the two or more pathogens are bacterial pathogens. In some cases, the two or more pathogens are helminths. In some cases, the two or more pathogens are protozoa. In some cases, the two or more pathogens are fungal pathogens.

[0106] In some case, the two or more different primer pairs provide for amplification of DNA from two or more categories of pathogens. For example, in some cases, the two or more different primer pairs provide for amplification of DNA from: two or more different hemorrhagic fever viruses. As another example, in some cases, the two or more different primer pairs provide for amplification of DNA of two or more different blood-borne pathogens. As another example, in some cases, the two or more different primer pairs provide for amplification of DNA of two or more different tick-borne pathogens. As another example, in some cases, the two or more different primer pairs provide for amplification of DNA of two or more different mosquito-borne pathogens. As another example, in some cases, the two or more different primer pairs provide for amplification of DNA of two or more antibiotic-resistant pathogens.

[0107] For example, forward and reverse primers that can be used in connection with detection of viral pathogens (i.e., that can be used to amplify a target nucleic acid of a viral pathogen) are set out in SEQ ID Nos:71 to 6432). The primers include primers suitable for amplifying Chikungunya virus (CHIKV), Dengue virus (DENV), Ebola virus, Hepatitis C virus (HCV), Hepatitis E virus (HEV), human immunodeficiency virus (HIV), Lassa virus, Marburg virus, measles virus, RVF, West Nile Virus (WNV), Yellow fever virus (YFV), and Zika virus (ZIKV). As another example, forward and reverse primers that can be used in connection with tick-borne diseases (i.e., that can be used to amplify a target nucleic acid of a tick-borne pathogen) are set out in SEQ ID Nos: 6433 to 13607. As yet another example, primers suitable for use in connection with detection of antibiotic resistance genes (e.g., nucleic acids that encode antibiotic resistance factors) are depicted in SEQ ID Nos:13608 to 17378. Examples of target nucleic acids in the context of antibiotic resistance are depicted in FIG. 8. Any of the forward primers can be paired with any of the reverse primers set out in the aforementioned figures, as long as the target nucleotide sequence to which the forward primer hybridizes is 5′ of the target nucleotide sequence to which the reverse primer hybridizes.

[0108] In some cases, the primers are spiked primers, as described in Example 2. In some cases, a method of the present disclosure comprises use of metagenomic sequencing with spiked primer enrichment (MSSPE), as described in Example 2.

### Amplification Methods

[0109] Various amplification methods and components will be known to one of ordinary skill in the art and any convenient method can be used (see, e.g., Zanoli and Spoto, Biosensors (Basel). 2013 March; 3(1): 18-43; Gill and Ghaemi, Nucleosides, Nucleotides, and Nucleic Acids, 2008, 27: 224-243; Craw and Balachandrana, Lab Chip, 2012, 12, 2469-2486; which are herein incorporated by reference in their entirety). Nucleic acid amplification can comprise polymerase chain reaction (PCR), reverse transcription PCR (RT-PCR), quantitative PCR (qPCR), reverse transcription qPCR (RT-qPCR), nested PCR, multiplex PCR, asymmetric PCR, touchdown PCR, random primer PCR, hemi-nested PCR, polymerase cycling assembly (PCA), colony PCR, ligase chain reaction (LCR), digital PCR, methylation specific-PCR (MSP), co-amplification at lower denaturation temperature-PCR (COLD-PCR), allele-specific PCR, intersequence-specific PCR (ISS-PCR), whole genome amplification (WGA), inverse PCR, and thermal asymmetric interlaced PCR (TAIL-PCR).

[0110] In some cases, the amplification is isothermal amplification. The term “isothermal amplification” indicates a method of nucleic acid (e.g., DNA) amplification (e.g., using enzymatic chain reaction) that can use a single temperature incubation thereby obviating the need for a thermal cycler. Isothermal amplification is a form of nucleic acid amplification which does not rely on the thermal denaturation of the target nucleic acid during the amplification reaction and hence may not require multiple rapid changes in temperature. Isothermal nucleic acid amplification methods can therefore be carried out inside or outside of a laboratory environment. By combining with a reverse transcription step, these amplification methods can be used to isothermally amplify RNA.

[0111] Examples of isothermal amplification methods include, but are not limited to, loop-mediated isothermal Amplification (LAMP), helicase-dependent Amplification (HDA), recombinase polymerase amplification (RPA), strand displacement amplification (SDA), nucleic acid sequence-based amplification (NASBA), transcription mediated amplification (TMA), nicking enzyme amplification reaction (NEAR), rolling circle amplification (RCA), multiple displacement amplification (MDA), Ramification (RAM), circular helicase-dependent amplification (cHDA), single primer isothermal amplification (SPIA), signal mediated amplification of RNA technology (SMART), self-sustained sequence replication (3 SR), genome exponential amplification reaction (GEAR) and isothermal multiple displacement amplification (IMDA).

[0112] In some cases, the amplification is recombinase polymerase amplification (RPA) (see, e.g., U.S. Pat. Nos. 8,030,000; 8,426,134; 8,945,845; 9,309,502; and 9,663,820, which are hereby incorporated by reference in their entirety). Recombinase polymerase amplification (RPA) uses two opposing primers (much like PCR) and employs three enzymes—a recombinase, a single-stranded DNA-binding protein (SSB) and a strand-displacing polymerase. The recombinase pairs oligonucleotide primers with homologous sequence in duplex DNA, SSB binds to displaced strands of DNA to prevent the primers from being displaced, and the strand displacing polymerase begins DNA synthesis where the primer has bound to the target DNA. Adding a reverse transcriptase enzyme to an RPA reaction can facilitate detection RNA as well as DNA, without the need for a separate step to produce cDNA. One example of components for an RPA reaction is as follows (see, e.g., U.S. Pat. Nos. 8,030,000; 8,426,134; 8,945,845; 9,309,502; 9,663,820): 50 mM Tris pH 8.4, 80 mM Potassium actetate, 10 mM Magnesium acetate, 2 mM DTT, 5% PEG compound (Carbowax-20M), 3 mM ATP, 30 mM Phosphocreatine, 100 ng/μ1 creatine kinase, 420 ng/μl gp32, 140 ng/μl UvsX, 35 ng/μl UvsY, 2000M dNTPs, 300 nM each oligonucleotide, 35 ng/μl Bsu polymerase, and a nucleic acid-containing sample).

[0113] In a transcription-mediated amplification (TMA) method, an RNA polymerase is used to make RNA from a promoter engineered in the primer region; then a reverse transcriptase synthesizes cDNA from the primer. A third enzyme, e.g., Rnase H, can then be used to degrade the RNA target from cDNA without the heat-denatured step. This amplification technique is similar to Self-Sustained Sequence Replication (3 SR) and Nucleic Acid Sequence Based Amplification (NASBA), but varies in the enzymes employed. As another example, helicase-dependent amplification (HDA) utilizes a thermostable helicase (Tte-UvrD) rather than heat to unwind dsDNA to create single-strands that are then available for hybridization and extension of primers by polymerase. As yet another example, a loop-mediated amplification (LAMP) method employs a thermostable polymerase with strand displacement capabilities and a set of four or more specific designed primers. Each primer is designed to have hairpin ends that, once displaced, snap into a hairpin to facilitate self-priming and further polymerase extension. In a LAMP reaction, though the reaction proceeds under isothermal conditions, an initial heat denaturation step is required for double-stranded targets. In addition, amplification yields a ladder pattern of various length products. As yet another example, a strand displacement amplification (SDA) combines the ability of a restriction endonuclease to nick the unmodified strand of its target DNA and an exonuclease-deficient DNA polymerase to extend the 3′ end at the nick and displace the downstream DNA strand.

### Target RNA

[0114] In some cases, a target DNA present in a sample is generated from an RNA template. Any known method of generating DNA from an RNA template can be used. For example, a reverse transcriptase can be used to generate a target DNA from a target RNA.

### Sequencing

[0115] As noted above, a subject method of characterizing a target DNA in a sample comprises ligating an adapter nucleic acid with a PAM-distal cleavage product, generating a ligation product comprising the adapter and the PAM-distal cleavage product. The PAM-distal cleavage product includes at least a portion of the target DNA. Thus, the ligation product includes at least a portion of the target DNA. The nucleotide sequence of the at least a portion of the target DNA present in the ligation product can be determined. The nucleotide sequence can be determined using any of a variety of methods for determining the nucleotide sequence of DNA.

[0116] In some cases, the nucleotide sequence is determined using next generation sequencing.

[0117] The term “next generation sequencing” (NGS) refers to the so-called highly parallelized methods of performing nucleic acid sequencing and comprises the sequencing-by-synthesis or sequencing-by-ligation platforms currently employed by Illumina, Life Technologies, Pacific Biosciences and Roche, etc. Next generation sequencing methods also include, but are not limited to, nanopore sequencing methods such as those offered by Oxford Nanopore, and electronic detection-based methods such as the Ion Torrent technology commercialized by Life Technologies.

[0118] As would be apparent to those skilled in the art, the ligation product may be amplified using primers that hybridize to the adapter present in the ligation product, thereby producing amplification products. In some cases, the primers used to amplify the fragments have a 5′ tail that provides compatibility with a particular sequencing platform. In certain cases, one or more of the primers used in this step may additionally contain a sample identifier (e.g., a bar code). If the primers have a sample identifier, then products from different samples can be pooled prior to sequencing. In some cases, this amplifying step may comprise appending a sample identifier sequence to the amplified fragments.

[0119] As would be apparent to those skilled in the art, the adapters and/or the primers used for amplification may be compatible with use in a next generation sequencing platform, e.g., Illumina's reversible terminator method, Roche's pyrosequencing method (454), Life Technologies' sequencing by ligation (the SOLiD platform), Life Technologies' Ion Torrent platform or Oxford Nanopore's MinIon system. Examples of such methods are described in the following references: Margulies et al. (Nature 2005 437: 376-80); Ronaghi et al. (Analytical Biochemistry 1996 242: 84-9); Shendure (Science 2005 309: 1728); Imelfort et al. (Brief Bioinform. 2009 10:609-18); Fox et al. (Methods Mol Biol. 2009; 553:79-108); Appleby et al. (Methods Mol Biol. 2009; 513:19-39) and Morozova (Genomics. 2008 92:255-64), which are incorporated by reference for the general descriptions of the methods and the particular steps of the methods, including all starting products, reagents, and final products for each of the steps. The present method may be used on any sequencing platform, including those that are based on sequencing-by-synthesis (i.e., by extending a primer that is hybridized to a template).

[0120] The DNA sequencing technology can utilize the Ion Torrent sequencing platform, which pairs semiconductor technology with a sequencing chemistry to directly translate chemically encoded information (A, C, G, T) into digital information (0, 1) on a semiconductor chip. Without wishing to be bound by theory, when a nucleotide is incorporated into a strand of DNA by a polymerase, a hydrogen ion is released as a byproduct. The Ion Torrent platform detects the release of the hydrogen atom as a change in pH. A detected change in pH can be used to indicate nucleotide incorporation. The Ion Torrent platform comprises a high-density array of micro-machined wells to perform this biochemical process in a massively parallel way. Each well holds a different library member, which may be clonally amplified. Beneath the wells is an ion-sensitive layer and beneath that an ion sensor. The platform sequentially floods the array with one nucleotide after another. When a nucleotide, for example a C, is added to a DNA template and is then incorporated into a strand of DNA, a hydrogen ion will be released. The charge from that ion will change the pH of the solution, which can be identified by Ion Torrent's ion sensor. If the nucleotide is not incorporated, no voltage change will be recorded and no base will be called. If there are two identical bases on the DNA strand, the voltage will be double, and the chip will record two identical bases called. Direct identification allows recordation of nucleotide incorporation in seconds. Library preparation for the Ion Torrent platform generally involves ligation of two distinct adaptors at both ends of a DNA fragment.

[0121] The DNA sequencing technology can utilize an Illumina sequencing platform, which generally employs cluster amplification of library members onto a flow cell and a sequencing-by-synthesis approach. Cluster-amplified library members are subjected to repeated cycles of polymerase-directed single base extension. Single-base extension can involve incorporation of reversible-terminator dNTPs, each dNTP labeled with a different removable fluorophore. The reversible-terminator dNTPs are generally 3′ modified to prevent further extension by the polymerase. After incorporation, the incorporated nucleotide can be identified by fluorescence imaging. Following fluorescence imaging, the fluorophore can be removed and the 3′ modification can be removed resulting in a 3′ hydroxyl group, thereby allowing another cycle of single base extension. Library preparation for the Illumina platform generally involves ligation of two distinct adaptors at both ends of a DNA fragment.

[0122] The DNA sequencing technology that is used can be the Helicos True Single Molecule Sequencing (tSMS), which can employ sequencing-by-synthesis technology. In the tSMS technique, a polyA adaptor can be ligated to the 3′ end of DNA fragments. The adapted fragments can be hybridized to poly-T oligonucleotides immobilized on the tSMS flow cell. The library members can be immobilized onto the flow cell at a density of about 10⁸ templates/cm². The flow cell can be then loaded into an instrument, e.g., HeliScopeTM sequencer, and a laser can illuminate the surface of the flow cell, revealing the position of each template. A CCD camera can map the position of the templates on the flow cell surface. The library members can be subjected to repeated cycles of polymerase-directed single base extension. The sequencing reaction begins by introducing a DNA polymerase and a fluorescently labeled nucleotide. The polymerase can incorporate the labeled nucleotides to the primer in a template directed manner. The polymerase and unincorporated nucleotides can be removed. The templates that have directed incorporation of the fluorescently labeled nucleotide can be discerned by imaging the flow cell surface. After imaging, a cleavage step can remove the fluorescent label, and the process can be repeated with other fluorescently labeled nucleotides until a desired read length is achieved. Sequence information can be collected with each nucleotide addition step.

[0123] The DNA sequencing technology can utilize a SOLiD™ technology (Applied Biosystems). The SOLiD platform generally utilizes a sequencing-by-ligation approach. Library preparation for use with a SOLiD platform generally comprises ligation of adapters to the 5′ and 3′ ends of the DNA fragments (e.g., ligation products) to be sequenced to generate a fragment library. Alternatively, internal adapters can be introduced by ligating adapters to the 5′ and 3′ ends of the fragments, circularizing the fragments, digesting the circularized fragment to generate an internal adaptor, and attaching adaptors to the 5′ and 3′ ends of the resulting fragments to generate a mate-paired library. Next, clonal bead populations can be prepared in microreactors containing beads, primers, template, and PCR components. Following PCR, the templates can be denatured. Beads can be enriched for beads with extended templates. Templates on the selected beads can be subjected to a 3′ modification that permits bonding to a glass slide. The sequence can be determined by sequential hybridization and ligation of partially random oligonucleotides with a central determined base (or pair of bases) that is identified by a specific fluorophore. After a color is recorded, the ligated oligonucleotide can be removed and the process can then be repeated.

[0124] The DNA sequencing technology can utilize a single molecule, real-time (SMRTTM) sequencing platform (Pacific Biosciences). In SMRT sequencing, the continuous incorporation of dye-labeled nucleotides can be imaged during DNA synthesis. Single DNA polymerase molecules can be attached to the bottom surface of individual zero-mode wavelength identifiers (ZMW identifiers) that obtain sequence information while phospholinked nucleotides are being incorporated into the growing primer strand. A ZMW generally refers to a confinement structure which enables observation of incorporation of a single nucleotide by DNA polymerase against a background of fluorescent nucleotides that rapidly diffuse in an out of the ZMW on a microsecond scale. By contrast, incorporation of a nucleotide generally occurs on a milliseconds timescale. During this time, the fluorescent label can be excited to produce a fluorescent signal, which is detected. Detection of the fluorescent signal can be used to generate sequence information. The fluorophore can then be removed, and the process repeated. Library preparation for the SMRT platform generally involves ligation of hairpin adaptors to the ends of DNA fragments.

[0125] The DNA sequencing technology can utilize nanopore sequencing (e.g. as described in Soni G V and Meller A. Clin Chem 53: 1996-2001 (2007)). Nanopore sequencing DNA analysis techniques are being industrially developed by a number of companies, including Oxford Nanopore Technologies (Oxford, United Kingdom). Nanopore sequencing is a single-molecule sequencing technology whereby a single molecule of DNA is sequenced directly as it passes through a nanopore. A nanopore can be a small hole, of the order of 1 nanometer in diameter Immersion of a nanopore in a conducting fluid and application of a potential (voltage) across can result in a slight electrical current due to conduction of ions through the nanopore. The amount of current which flows is sensitive to the size and shape of the nanopore and to occlusion by, e.g., a DNA molecule. As a DNA molecule passes through a nanopore, each nucleotide on the DNA molecule obstructs the nanopore to a different degree, changing the magnitude of the current through the nanopore in different degrees. Thus, this change in the current as the DNA molecule passes through the nanopore represents a reading of the DNA sequence.

[0126] The DNA sequencing technology can utilize a chemical-sensitive field effect transistor (chemFET) array (e.g., as described in U.S. Patent Application Publication No. 20090026082). In one example of the technique, DNA molecules can be placed into reaction chambers, and the template molecules can be hybridized to a sequencing primer bound to a polymerase. Incorporation of one or more triphosphates into a new nucleic acid strand at the 3′ end of the sequencing primer can be discerned by a change in current by a chemFET. An array can have multiple chemFET sensors. In another example, single nucleic acids can be attached to beads, and the nucleic acids can be amplified on the bead, and the individual beads can be transferred to individual reaction chambers on a chemFET array, with each chamber having a chemFET sensor, and the nucleic acids can be sequenced.

### Target Nucleic Acids

[0127] A target nucleic acid can be single stranded (ssDNA), a double stranded (dsDNA), or an RNA.

[0128] Where the target DNA is a ssDNA, the ssDNA can be used as a template for second strand synthesis, to generate a dsDNA. Where the target nucleic acid is an RNA, the RNA can be used as a template for reverse transcriptase, to generate a complementary DNA (cDNA); and the cDNA can be used as a template for second strand synthesis, to generate a dsDNA.

[0129] When the target DNA is single stranded, there is no preference or requirement for a PAM sequence in the target DNA. However, when the target DNA is dsDNA, a PAM is usually present adjacent to the target sequence of the target DNA (e.g., see discussion of the PAM elsewhere herein). The source of the target DNA can be the same as the source of the sample, e.g., as described below.

[0130] The source of the target nucleic acid can be from any source. In some cases, the target DNA is DNA of a pathogen. In some cases, the target nucleic acid is not from a pathogenic organism. In some cases, the target DNA is from a mammal. In some cases, the target nucleic acid is from a plant.

[0131] In some cases, the target nucleic acid is DNA or RNA of a pathogen (e.g., a pathogen that infects a human; a pathogen that infects a non-human mammal; a pathogen that infects a bird; a pathogen that infects a reptile; a pathogen that infects an amphibian; a pathogen that infects a fish; a pathogen that infects a plant; etc.).

[0132] In some cases, the target nucleic acid is a not from a pathogenic organism. For example, in some cases, the target nucleic acid is fetal DNA from a human.

[0133] In some cases, the target DNA is a viral DNA (e.g., a genomic DNA of a DNA virus). In some cases, the target DNA is bacterial DNA. In some cases, the target DNA is DNA of a protozoan. In some cases, the target DNA is DNA of a helminth. In some cases, the target DNA is DNA of a fungus.

[0134] The target nucleic acid can be from a bacterium, such as Bacillus (e.g., B. anthracis), Enterobacteriaceae (e.g., Salmonella, Escherichia coli, Yersinia pestis, Klebsiella, and Shigella), Yersinia (e.g., Y. pestis or Y. enterocolitica), Staphylococcus (e.g., S. aureus), Streptococcus, Gonorrheae, Enterococcus (e.g., E. faecalis), Listeria (e.g., L. monocytogenes), Brucella (e.g., B. abortus, B. melitensis, or B. suis), Vibrio (e.g., V. cholerae), Corynebacterium diphtheria, Pseudomonas (e.g., P. pseudomallei or P. aeruginosa), Burkholderia (e.g., B. mallei or B. pseudomallei), Shigella (e.g., S. dysenteriae), Rickettsia (e.g., R. rickettsii, R. prowazekii, or R. typhi), Francisella tularensis, Chlamydia psittaci, Coxiella burnetii, Mycoplasma (e.g., M. mycoides), etc.

[0135] The target nucleic acid can be from a virus, such as Adenoviridae (e.g., adenovirus), Arenaviridae (e.g., Machupo virus), Bunyaviridae (e.g., Hantavirus or Rift Valley fever virus), Coronaviridae, Orthomyxoviridae (e.g., influenza viruses), Filoviridae (e.g., Ebola virus and Marburg virus), Flaviviridae (e.g., Japanese encephalitis virus and Yellow fever virus), Hepadnaviridae (e.g., hepatitis B virus), Herpesviridae (e.g., herpes simplex viruses), Papovaviridae (e.g., papilloma viruses), Paramyxoviridae (e.g., respiratory syncytial virus, measles virus, mumps virus, or parainfluenza virus), Parvoviridae, Picornaviridae (e.g., polioviruses), Poxviridae (e.g., variola viruses), Reoviridae (e.g., rotaviruses), Retroviridae (e.g., human T cell lymphotropic viruses (HTLV) and human immunodeficiency viruses (HIV)), Rhabdoviridae (e.g., rabies virus), and Togaviridae (e.g., encephalitis viruses, yellow fever virus, and rubella virus)). Where the virus is a ssDNA virus, the ssDNA can be used as a template for second strand synthesis, to generate a dsDNA. Where the virus is an RNA virus, the RNA can be used as a template for reverse transcriptase, to generate a complementary DNA (cDNA); and the cDNA can be used as a template for second strand synthesis, to generate a dsDNA.

[0136] The target nucleic acid can be from a protozoon, such as Cryptosporidium parvum, Encephalitozoa, Plasmodium (e.g., Plasmodium falciparum), Toxoplasma gondii, Acanthamoeba, Entamoeba histolytica, Giardia lamblia, Trichomonas vaginalis, Leishmania, or Trypanosoma (e.g., T. brucei; T. cruzi); etc.

[0137] The target nucleic acid can be from a helminth, such as cestodes (tapeworms), trematodes (flukes), or nematodes (roundworms, e.g., Ascaris lumbricoides, Trichuris trichiura, Necator americanus, or Ancylostoma duodenale); etc.

[0138] The target nucleic acid can be from a fungus, such as Aspergilli, Candidae, Coccidioides immitis, and Cryptococci.

[0139] Examples of possible target nucleic acids include, but are not limited to, viral nucleic acids such as: a papovavirus (e.g., human papillomavirus (HPV), polyomavirus); a hepadnavirus (e.g., Hepatitis B Virus (HBV)); a herpesvirus (e.g., herpes simplex virus (HSV), varicella zoster virus (VZV), Epstein-Barr virus (EBV), cytomegalovirus (CMV), herpes lymphotropic virus, Pityriasis Rosea, kaposi's sarcoma-associated herpesvirus); an adenovirus (e.g., atadenovirus, aviadenovirus, ichtadenovirus, mastadenovirus, siadenovirus); a poxvirus (e.g., smallpox, vaccinia virus, cowpox virus, monkeypox virus, orf virus, pseudocowpox, bovine papular stomatitis virus; tanapox virus, yaba monkey tumor virus; molluscum contagiosum virus (MCV)); a parvovirus (e.g., adeno-associated virus (AAV), Parvovirus B19, human bocavirus, bufavirus, human parv4 G1); Geminiviridae; Nanoviridae; Phycodnaviridae; Zika virus; and the like.

[0140] In some cases, the target nucleic acid is from a viral pathogen selected from among Adenoviruses, Alphaviruses (Togaviruses), Eastern equine encephalitis virus, Eastern equine encephalomyelitis virus, Venezuelan equine encephalomyelitis vaccine strain TC-83, Western equine encephalomyelitis virus, Arenaviruses, Lymphocytic choriomeningitis virus (non-neurotropic strains), Tacaribe virus complex, Bunyaviruses, Bunyamwera virus, Rift Valley fever virus vaccine strain MP-12, Calciviruses, Coronaviruses. Flaviviruses (Togaviruses)-Group B Arboviruses, Dengue virus serotypes 1, 2, 3, and 4, Yellow fever virus vaccine strain 17D, Hepatitis A, B, C, D, and E viruses, the Cytomegalovirus, Epstein Barr virus, Herpes simplex types 1 and 2, Herpes zoster, Human herpesvirus types 6 and 7, Influenza viruses types A, B, and C, Papovaviruses, Papilloma viruses, Newcastle disease virus, Measles virus, Mumps virus, Parainfluenza viruses types 1, 2, 3, and 4, polyomaviruses (JC virus, BK virus), Respiratory syncytial virus, Human parvovirus (B 19), Coxsackie viruses types A and B, Echoviruses, Polioviruses, Rhinoviruses, Alastrim (Variola minor virus), Smallpox (Variola major virus), Whitepox Reoviruses, Coltivirus, human Rotavirus, and Orbivirus (Colorado tick fever virus), Rabies virus, Vesicular stomatitis virus, Rubivirus (rubella), Semliki Forest virus, St. Louis encephalitis virus, Venezuelan equine encephalitis virus, Venezuelan equine encephalomyelitis virus, Arenaviruses (a.k.a. South American Hemorrhagic Fever virus), Flexal, Lymphocytic choriomeningitis virus (LCM) (neurotropic strains), Hantaviruses including Hantaan virus, Rift Valley fever virus, Japanese encephalitis virus, Yellow fever virus, Monkeypox virus, Human immunodeficiency virus (HIV) types 1 and 2, Human T cell lymphotropic virus (HTLV) types 1 and 2, Simian immunodeficiency virus (SIV), Vesicular stomatitis virus, Guanarito virus, Lassa fever virus, Junin virus, Machupo virus, Sabia, Crimean-Congo hemorrhagic fever virus, Ebola viruses, Marburg virus, Tick-borne encephalitis virus complex (flavi) including Central European tick-borne encephalitis, Far Eastern tick-borne encephalitis, Hanzalova, Hypr, Kumlinge, Kyasanur Forest disease, Omsk hemorrhagic fever, and Russian Spring Summer encephalitis viruses, Herpesvirus simiae (Herpes B or Monkey B virus), Cercopithecine herpesvirus 1 (Herpes B virus), Equine morbillivirus (Hendra and Hendra-like viruses), Nipah virus, Variola major virus (Smallpox virus), Variola minor virus (Alastrim), African swine fever virus, African horse sickness virus, Akabane virus, Avian influenza virus (highly pathogenic), Blue tongue virus, Camel pox virus, Classical swine fever virus, Cowdria ruminantium (heartwater), Foot and mouth disease virus, Goat pox virus, Japanese encephalitis virus, Lumpy skin disease virus, Malignant catarrhal fever virus, Menangle virus, Newcastle disease virus (VVND), Peste Des Petits Ruminants virus, Rinderpest virus, Sheep pox virus, Swine vesicular disease virus, and Vesicular stomatitis virus (exotic).

[0141] In some cases, the target nucleic acid is bacterial DNA, e.g., DNA of a pathogenic bacterium. In some embodiments, the bacterial pathogen is selected from among Acinetobacter baumannii (formerly Acinetobacter calcoaceticus); Actinobacillus; Actinomyces pyogenes (formerly Corynebacterium pyogenes); Actinomyces israelii; Nocardia asteroides; N brasiliensis; Aeromonas hydrophila; Amycolata autotrophica; Archanobacterium haemolyticum (formerly Corynebacterium haemolyticum); Arizona hinshawii—all serotypes; Bacillus anthracis; Bacteroides fragilis; Bartonella henselae; B. quintana; B. vinsonii; Bordetella including B. pertussis; Borrelia recurrentis; B. burgdorferi; Burkholderia (formerly Pseudomonas species), Campylobacter coli, C. fetus, C. jejuni, Chlamydia psittaci, C. trachomatis, C. pneumonia, Clostridium botulinum (neurotoxin producing species), Cl. chauvoei, Cl. haemolyticum, Cl. histolyticum, Cl. novyi, Cl. septicum, Cl. tetani, Cl. perfringens, Corynebacterium diphtheriae, C. pseudotuberculosis, C. renale, Dermatophilus congolensis, Edwardsiella tarda, Erysipelothrix rhusiopathiae, Escherichia coli—all enteropathogenic, enterotoxigenic, enteroinvasive and strains bearing K1 antigen, including E. coli O157:H7; Haemophilus ducreyi, H influenzae; Helicobacter pylori, Klebsiella—all species; Legionella including L. pneumophila; Leptospira interrogans—all serotypes; Listeria, Moraxella, Mycobacterium, including M. avium complex, M. asiaticum, M bovis BCG vaccine strain, M. chelonei, M. fortuitum, M. kansasii, M. leprae, M. malmoense, M. marinum, M. paratuberculosis, M. scrofulaceum, M. simiae, M. szulgai, M. ulcerans, M. xenopi; Mycoplasma; Neisseria gonorrhoeae, N. meningitides, Nocardia asteroides, N. brasiliensis, N. otitidiscaviarum, N transvalensis; Proteus mirabilis; P. vulgaris; Rhodococcus equi; Salmonella including S. arizonae, S. cholerasuis, S. enteritidis, S. gallinarum-pullorum, S. meleagridis, S. paratyphi, A, B, C, S. typhi; S. typhimurium; Shigella including S. boydii, S. dysenteriae, type 1, S. flexneri, S. sonnei; Sphaerophorus necrophorus; Staphylococcus aureus; Streptobacillus moniliformis; Streptococcus including S. pneumoniae, S. pyogenes; Treponema pallidum, T. carateum; Vibrio cholerae, V. parahemolyticus, V. vulnificus; Yersinia enterocolitica; Bartonella; Brucella including B. abortus, B. canis, B. suis, B. melitensis; Burkholderia (Pseudomonas) mallei; B. pseudomallei; Coxiella burnetiid; Francisella tularensis; Mycobacterium bovis, M. tuberculosis; Mycobacteria; Pasteurella multocida type B-“buffalo” and other virulent strains; Rickettsia akari, R. australis, R. canada, R. conorii, R. prowazekii, R. rickettsii, R. siberica, R. tsutsugamushi, R. typhi (R. mooseri); and Yersinia pestis.

[0142] In some cases, the target nucleic acid is a nucleic acid of a parasite, e.g., a parasite selected from among Ancylostoma human hookworms including A. duodenale, A. ceylanicum; Ascaris including Ascaris lumbricoides suum; Babesia including B. divergens, B. microti; Brugia filaria worms including B. malayi, B. timori; Coccidia; Cryptosporidium including C. parvum; Cysticercus cellulosae (hydatid cyst, larva of T. solium); Echinococcus including E. granulosis, E. multilocularis, E. vogeli; Entamoeba histolytica; Enterobius; Fasciola including F. gigantica, F. hepatica; Giardia including G. lamblia; Heterophyes; Hymenolepis including H. diminuta, H. nana; Isospora; Leishmania including L. braziliensis, L. donovani, L. ethiopia, L. major, L. mexicana, L. peruvania, L. tropica; Loa loa filaria worms; Microsporidium; Naegleria fowleri; Necator human hookworms including N. americanus; Onchocerca filaria worms including, O. volvulus; Plasmodium cynomologi, P. falciparum, P. malariae, P. ovale, P. vivax; Sarcocystis including S. sui hominis; Schistosoma including S. haematobium, S. intercalatum, S. japonicum, S. mansoni, S. mekongi; Strongyloides including S. stercoralis; Taenia solium; Toxocara including T. canis; Toxoplasma including T. gondii; Trichinella spiralis; Trypanosoma including T. brucei brucei, T. brucei gambiense, T. brucei rhodesiense, T. cruzi; and Wuchereria bancrofti filaria worms.

[0143] In some cases, the target nucleic acid is nucleic acid of a fungus, e.g., from a fungal pathogen selected from among Aspergillus fumigates, Blastomyces dermatitidis, Cladosporium bantianum, Candida albicans, C. (Xylohypha) trichoides, Cryptococcus neoformans, Dactylaria galopava (Ochroconis gallopavum), Epidermophyton, Exophiala (Wangiella) dermatitidis, Fonsecaea pedrosoi, Microsporum, Paracoccidioides braziliensis, Penicillium marneffei, Pneumocystis carinii, Sporothrix schenckii, Trichophyton, Coccidioides immitis, Coccidioides posadasii, Histoplasma capsulatum, and H. capsulatum var. duboisii.

[0144] In some cases, the drug resistant pathogen is selected from the group consisting of vancomycin-resistant Enterococcus faecium, methicillin-resistant Staphylococcus aureus, penicillin-resistant Streptococcus pneumoniae, multi-drug resistant Mycobacterium tuberculosis, and AZT-resistant human immunodeficiency virus.

[0145] Target nucleic acids can include, e.g., 16S ribosomal RNA (rRNA), e.g., where the target nucleic acid is a nucleic acid of a bacterium (e.g., Anaplasma, Bartonella, Borrelia burgdoferi, Borrelia miyamotoi, Brucella, Chlamydophila, Coxiella, Francisella, Rickettsia, etc.). Target nucleic acids can encompass the entire genome (e.g., where the target nucleic acid is a nucleic acid of a viral pathogen).

[0146] Target nucleic acids also include any nucleic acid from a bacterium, fungus, or parasite that is used for identification and genotyping.

[0147] In some cases, the target nucleic acid is a particular segment or coding region of a nucleic acid. For example, for certain viruses, a nucleic acid encoding a structural polyprotein can be the target nucleic acid. As another example, for certain viruses, an L segment nucleic acid can be the target nucleic acid. As another example, for certain viruses, a nucleic acid encoding an NS5 polypeptide can be the target nucleic acid.

[0148] For example, for Colorado tick fever virus, segment 1 can be the target nucleic acid. As another example, for Epstein-Barr Virus, a nucleic acid encoding nuclear protein can be the target nucleic acid. As another example, for Eastern Equine Encephalitis Virus, a nucleic acid encoding a structural polyprotein can be the target nucleic acid. As another example, for Hanta virus, Heartland virus, La Crosse Virus, Lymphocytic Choriomeningitis Virus, Sin Nombre Virus, an L segment nucleic acid can be the target nucleic acid.

[0149] In some cases, e.g., where the target nucleic acid is a nucleic acid of a fungus (e.g., Apophysomyces, Aspergillus, Blastomyces, Candida, Coccidiodes, Cryptococcus, Cunninghamella, Fusarium, Histoplasma, Lichteimia, Murcor, Rhizopus, and the like), an internal transcribed spacer 1 (ITS1) gene can be the target nucleic acid.

[0150] In some cases, e.g., where the target nucleic acid is a nucleic acid of a parasite (e.g., Acanthamoeba, Angiostrongylus, Ascaris, Babesia, Balamuthia, Blastocytis, Brugia, Cyclospora, Echinococcus, Entamoeba, Fasciola, Giardia, Leishmania, Loa Loa, Naegleria, Schistosoma, Strongyloides, Taenia, Toxoplasma, Trichinella, Trypanosoma, Plasmodium, and the like), a target nucleic acid can be an 18S rRNA.

[0151] In some cases, e.g., where the target nucleic acid is an antibiotic resistance gene, the target nucleic acid can be a gene involved in one or more of: i) aminoglycoside resistance (e.g., an aac (acetylase) gene; an aph (phosphorylation) gene; an ant (adenylation gene); ii) beta-lactam resistance, e.g., where the gene is a beta-lactamase gene, such as beta-lactamase class A, beta-lactamase class B, beta-lactamase class C, or beta-lactamase class D); iii) macrolide-lincosamide-streptogramin B (MLSB) resistance (e.g., an erm rRNA methylase; an APT-binding transporter, a major facilitator family transporter, an esterase, a hydrolase, a transferase, or a phosphorylase); iv) a multidrug transporter (e.g., a major facilitator superfamily (MFS) transporter, an ATP-binding cassette transporter, an resistance-nodulation-cell divisional (RND) transporter, or a small multidrug resistance (SMR) transporter; v) tetracycline resistance (e.g., tetracycline efflux resistance or ribosome protection resistance); and vi) vancomycin resistance (e.g., VanA type operon, VanB type operon, VanC type operon, VanD type operon, VanE type operon, or VanG type operon).

[0152] In some cases, e.g., where the target nucleic acid is an antibiotic resistance gene, the target nucleic acid can be a gene involved aminoglycoside resistance. In some cases, e.g., where the target nucleic acid is an antibiotic resistance gene, the target nucleic acid can be an acetyltransferase gene (e.g., aac2I, aac2Ia, aac2Ib, etc.). In some cases, e.g., where the target nucleic acid is an antibiotic resistance gene, the target nucleic acid can be a nucleotidyltransferase (adenylyltransferase) (e.g., aadD ant2Ia, ant2Ib, ant3Ia, aad9, aad9Ib, etc.). In some cases, e.g., where the target nucleic acid is an antibiotic resistance gene, the target nucleic acid can be a phosphotransferase (e.g., aph33Ia, aph331b, aph3IIIa, aph3Iva, etc.).

[0153] In some cases, e.g., where the target nucleic acid is an antibiotic resistance gene, the target nucleic acid can be a gene involved in beta-lactam resistance. For example, the target nucleic acid is in some instances a beta-lactamase class A gene (e.g., BL2a_1, BL2a_III, BL2_len, BL2b_rob, BL2c_bro, BL2_kpc, etc. As another example, the target nucleic acid is in some instances a beta-lactamase class B gene (e.g., BL3_ccra, BL3 imp, BL3_sim, BL3_cit, BL3_vim, etc.). As another example, the target nucleic acid is in some instances a beta-lactamase class C gene (e.g., BL1_ampc, BL1-asba, BL1_cmy2, BL1_ec, BL1_pao, etc. As another example, the target nucleic acid is in some instances a beta-lactamase class D gene (e.g., BL2d_lcr1, BL2d_moxa, BL2d_oxa1, BL2d_r39, etc.).

[0154] In some cases, e.g., where the target nucleic acid is an antibiotic resistance gene, the target nucleic acid can be a gene involved in macrolide-lincosamide-streptogramin B (MLSB) resistance. For example, the target nucleic acid is in some instances an erm class rRNA methylase (e.g., ermA, ermB, ermC, ermD, ermE, ermF, ermG, ermH, ermN, ermO, ermQ, ermS, ermT, etc.). As another example, the target nucleic acid is in some instances an ATP transporter gene (e.g., CarA, MsrA, OleB, SrmB, TlrC, VgaA, or VgaB). As another example, the target nucleic acid is in some instances a major facilitator superfamily transporter gene (e.g., LmrA, LmrB, or MefA). As another example, the target nucleic acid is in some instances an esterase gene (e.g., EreA or EreB). As another example, the target nucleic acid is in some instances a hydrolase gene (e.g., VgbA or VgbB). As another example, the target nucleic acid is in some instances a transferase gene (e.g., LnuA, LnuB, VatA, VatB, VatC, VatD, or VatE. As another example, the target nucleic acid is in some instances a phosphorylase gene (e.g., MphA, MphB, or MphC).

[0155] In some cases, e.g., where the target nucleic acid is an antibiotic resistance gene, the target nucleic acid can be a multidrug transporter gene. For example, the target nucleic acid is in some instances an ABC transporter gene (e.g., lsa). As another example, the target nucleic acid is in some instances a major facilitator superfamily transporter gene (e.g., Bmr, EmeA, EmrD, PmrA, RosA, cm1_e1, cm1_e2, etc.). As another example, the target nucleic acid is in some instances an RND transporter gene (e.g., AcrA, AcrB, AdeA, AdeB, AmrA, AmrB, CeoA, SmeA, SmeB, MexA, MexB, TolC, AdeC, OprA, OprM, etc.). As another example, the target nucleic acid is in some instances an SMR transporter gene (e.g., EmrE or Qac).

[0156] In some cases, e.g., where the target nucleic acid is an antibiotic resistance gene, the target nucleic acid can be a gene involved in tetracycline resistance. For example, the target nucleic acid is in some instances a tetracycline efflux protein gene (e.g., otrB, tcr3, tet30, tet31, tet33, tet39, tetA, tetB, tetC, tetD, tetE, tetG, tetH, tetJ, tetK, tetL, tetPA, tetV, tetY, tetZ, etc.). As another example, the target nucleic acid is in some instances a ribosomal protection protein against tetracycline gene (e.g., otrA, tet, tet32, tet36, tetM, tetO, tetPB, tetQ, tetS, tetT, or tetW).

[0157] In some cases, e.g., where the target nucleic acid is an antibiotic resistance gene, the target nucleic acid can be a gene involved in vancomycin resistance. For example, the target nucleic acid is in some instances a VanA operon gene (e.g., VanA, VanHA, VanRA, etc.). As another example, the target nucleic acid is in some instances a VanB operon gene (e.g., VanB, VanHB, VanRB, VanSB, etc.). As another example, the target nucleic acid is in some instances a VanC operon gene (e.g., VanC, VanRC, VanSC, VanT, or VanXYC). As another example, the target nucleic acid is in some instances a VanD operon gene (e.g., VanD, VanHD, VanRD, VanSD, VanXD, or VanYD). As another example, the target nucleic acid is in some instances a VanE operon gene (e.g., VanE, VanRE, VanSE, VanTE, or VanXYE). As another example, the target nucleic acid is in some instances a VanG operon gene (e.g., VanG, VanRG, VanSG, VanTG, VanUG, VanWG, VanXYG, or VanYG).

[0158] In some cases, e.g., where the target nucleic acid is an antibiotic resistance gene, the target nucleic acid can be a gene listed in FIG. 8. Non-limiting examples of such antibiotic resistance genes include blaₜₑₘ, bla_{slw}, bla_{rob}, blaₒₓₐ, blaZ, aadB, aacC1, aacC2, aacC3, aac6′-IIa, aacA4, aad(6′), vanA, vanB, vanC, msrA, sarA, aac(6′) aph(2″), vat, vga, ermA, ermB, ermC, int, sul, aac2ia, aac2ib, aac2ic, aac2id, aac2i, aac3ia, aac3iia, aac3iib, aac3iii, aac3iv, aac3ix, aac3vi, aac3viii, aac3vii, aac3x, aac6i, aac6ia, aac6ib, aac6ic, aac6ie, aac6if, aac6ig, aac6iia, aac6iib, aad9, aad9ib, aadd, acra, acrb, adea, adeb, adec, amra, amrb, ant2ia, ant2ib, ant3ia, ant4iia, ant6ia, aph33ia, aph33ib, aph3ia, aph3ib, aph3ic, aph3iiia, aph3iva, aph3va, aph3vb, aph3via, aph3viia, aph4ib, aph6ia, aph6ib, aph6ic, aph6id, arna, baca, bcra, bcrc, b11_acc, b11_ampc, b11_asba, b11_ceps, b11_cmy2, b11_ec, b11_fox, b11_mox, b11_och, b11_pao, b11_pse, b11_sm, b12a_1, b12a_exo, b12a_iii2, b12a_iii, b12a_kcc, b12a_nps, b12a_okp, b12a_pc, b12be_ctxm, b12be_oxy1, b12be_per, b12be_shv2, b12b_rob, b12b_tem1, b12b_tem2, b12b_tem, b12b_tle, b12b_ula, b12c_bro, b12c_pse1, b12c_pse3, b12d_lcr1 b12d_moxa, b12d_oxa10, b12d_oxa1, b12d_oxa2, b12d_oxa5, b12d_oxa9, b12d_r39, b12e_cbla, b12e_cepa, b12e_cfxa, b12e_fpm, b12e_y56, b12f_nmca, b12f_sme1, b12_ges, b12_kpc, b12_len, b12veb, b13_ccra, b13_cit, b13_cpha, b13_gim, b13_imp, b13_1, b13_shw, b13_sim, b13_vim, ble, blt, bmr, cara, cata10, cata11, cata12, cata13, cata14, cata15, cata16, cata1, cata2, cata3, cata4, cata5, cata6, cata7, cata8, cata9, catb1, catb2, catb3, catb4, catb5, ceoa, ceob, cm1_e1, cm1_e2, cm1_e3, cm1_e4, cm1_e5, cm1_e6, cm1_e7, cm1_e8, dfra10, dfra12, dfra13, dfra14, dfra15, dfra16, dfra17, dfra19, dfra1, dfra20, dfra21, dfra22, dfra23, dfra24, dfra25, dfra25, dfra25, dfra26, dfra5, dfra7, dfrb1, dfrb2, dfrb3, dfrb6, emea, emrd, emre, erea, ereb, erma, ermb, ermc, ermd, erme, ermf, ermg, ermh, ermn, ermo, ermq, ermr, erms, ermt, ermu, ermv, ermw, ermx, ermy, fosa, fosb, fosc, fosx, fusb, fush, ksga, lmra, lmrb, lnua, lnub, lsa, maca, macb, mdte, mdtf, mdtg, mdth, mdtk, mdtl, mdtm, mdtn, mdto, mdtp, meca, mecrl, mefa, mepa, mexa, mexb, mexc, mexd, mexe, mexf, mexh, mexi, mexw, mexx, mexy, mfpa, mpha, mphb, mphc, msra, norm, oleb, opcm, opra, oprd, oprj, oprm, oprn, otra, otrb, pbpla, pbplb, pbp2b, pbp2, pbp2x, pmra, qac, qaca, qacb, qnra, qnrb, qnrs, rosa, rosb, smea, smeb, smec, smed, smee, smef, srmb, sta, str, sul1, sul2, sul3, tcma, tcr3, tet30, tet31, tet32, tet33, tet34, tet36, tet37, tet38, tet39, tet40, teta, tetb, tetc, tetd, tete, tetg, teth, tetj, tetk, tetl, tetm, teto, tetpa, tetpb, tet, tetq, tets, tett, tetu, tetv, tetw, text, tety, tetz, tlrc, tmrb, tolc, tsnr, vana, vanb, vanc, vand, vane, yang, vanha, vanhb, vanhd, vanra, vanrb, vanrc, vanrd, vanre, vanrg, vansa, vansb, vansc, vansd, vanse, vansg, vant, vante, vantg, vanug, vanwb, vanwg, vanxa, vanxb, vanxd, vanxyc, vanxye, vanxyg, vanya, vanyb, vanyd, vanrg, vanz, vata, vatb, vatc, vatd, vate, vgaa, vgab, vgba, vgbb, vph, ykkc, and ykkd (see the Antibiotic Resistance Genes Database (ARDB) available online). For example, in some cases, the target nucleic acid can be, e.g., mecA (e.g., as found in methicillin-resistant Staphylococcus aureus (MRSA)).

### Samples

[0159] A sample includes a nucleic acid. As noted above, nucleic acids include: i) dsDNAs; ii) ssDNA, where a dsDNA can be prepared from a ssDNA, e.g., by second strand synthesis using the ssDNA as a template; and iii) RNA, where a dsDNA can be prepared from an RNA, e.g., by reverse transcription using the RNA as a template to generate a cDNA, and second strand synthesis using the cDNA as a template. For simplicity, the discussion below refers to “DNA” or “DNAs”; however, the nucleic acid being detected can be a dsDNA that is prepared from a ssDNA (such as a ssDNA virus) or from an RNA (such as an RNA virus).

[0160] A subject sample includes nucleic acid (e.g., a plurality of nucleic acids). The term “plurality” is used herein to mean two or more. In some cases, a sample includes two or more (e.g., 3 or more, 5 or more, 10 or more, 20 or more, 50 or more, 100 or more, 500 or more, 1,000 or more, or 5,000 or more) nucleic acids (e.g., dsDNAs; or in the case of a ssDNA, a dsDNA prepared from a ssDNA, e.g., by second strand synthesis using the ssDNA as a template; or in the case of an RNA, a dsDNA prepared from an RNA, e.g., by reverse transcription using the RNA as a template to generate a cDNA, and second strand synthesis using the cDNA as a template). In some cases, the sample includes 5 or more DNAs (e.g., 10 or more, 20 or more, 50 or more, 100 or more, 500 or more, 1,000 or more, or 5,000 or more DNAs) that differ from one another in sequence. In some cases, the sample includes 10 or more, 20 or more, 50 or more, 100 or more, 500 or more, 10³ or more, 5×10³ or more, 10⁴ or more, 5×10⁴ or more, 10⁵ or more, 5×10⁵ or more, 10⁶ or more 5×10⁶ or more, or 10⁷ or more, DNAs. In some cases, the sample comprises from 10 to 20, from 20 to 50, from 50 to 100, from 100 to 500, from 500 to 10³, from 10³ to 5×10³, from 5×10³ to 10⁴, from 10⁴ to 5×10⁴, from 5×10⁴ to 10⁵, from 10⁵ to 5×10⁵, from 5×10⁵ to 10⁶, from 10⁶ to 5×10⁶, or from 5×10⁶ to 10⁷, or more than 10⁷, DNAs. In some cases, the sample comprises from 5 to 10⁷ DNAs (e.g., that differ from one another in sequence)(e.g., from 5 to 10⁶, from 5 to 10⁵, from 5 to 50,000, from 5 to 30,000, from 10 to 10⁶, from 10 to 10⁵, from 10 to 50,000, from 10 to 30,000, from 20 to 10⁶, from 20 to 10⁵, from 20 to 50,000, or from 20 to 30,000 DNAs). In some cases, the sample includes 20 or more DNAs that differ from one another in sequence. In some cases, the sample includes DNAs from a cell lysate (e.g., a eukaryotic cell lysate, a mammalian cell lysate, a human cell lysate, a prokaryotic cell lysate, a plant cell lysate, and the like). For example, in some cases, the sample includes DNA from a cell such as a eukaryotic cell, e.g., a mammalian cell such as a human cell.

[0161] The term “sample” is used herein to mean any sample that includes DNA (e.g., in order to determine whether a target DNA is present among a population of DNAs). As noted above, nucleic acids include dsDNAs; or in the case of a ssDNA, a dsDNA prepared from a ssDNA, e.g., by second strand synthesis using the ssDNA as a template; or in the case of an RNA, a dsDNA prepared from an RNA, e.g., by reverse transcription using the RNA as a template to generate a cDNA, and second strand synthesis using the cDNA as a template. The sample can be derived from any source, e.g., the sample can be a synthetic combination of purified DNAs; the sample can be a cell lysate, a DNA-enriched cell lysate, or DNAs isolated and/or purified from a cell lysate. The sample can be from a patient (e.g., for the purpose of diagnosis). The sample can be from permeabilized cells. The sample can be from crosslinked cells. The sample can be in tissue sections. The sample can be from tissues prepared by crosslinking followed by delipidation and adjustment to make a uniform refractive index. Examples of tissue preparation by crosslinking followed by delipidation and adjustment to make a uniform refractive index have been described in, for example, Shah et al., Development (2016) 143, 2862-2867 doi:10.1242/dev.138560.

[0162] A “sample” can include a target DNA and a plurality of non-target DNAs. In some cases, the target DNA is present in the sample at one copy per 10 non-target DNAs, one copy per 20 non-target DNAs, one copy per 25 non-target DNAs, one copy per 50 non-target DNAs, one copy per 100 non-target DNAs, one copy per 500 non-target DNAs, one copy per 10³ non-target DNAs, one copy per 5×10³ non-target DNAs, one copy per 10⁴ non-target DNAs, one copy per 5×10⁴ non-target DNAs, one copy per 10⁵ non-target DNAs, one copy per 5×10⁵ non-target DNAs, one copy per 10⁶ non-target DNAs, or less than one copy per 10⁶ non-target DNAs. In some cases, the target DNA is present in the sample at from one copy per 10 non-target DNAs to 1 copy per 20 non-target DNAs, from 1 copy per 20 non-target DNAs to 1 copy per 50 non-target DNAs, from 1 copy per 50 non-target DNAs to 1 copy per 100 non-target DNAs, from 1 copy per 100 non-target DNAs to 1 copy per 500 non-target DNAs, from 1 copy per 500 non-target DNAs to 1 copy per 10³ non-target DNAs, from 1 copy per 10³ non-target DNAs to 1 copy per 5×10³ non-target DNAs, from 1 copy per 5×10³ non-target DNAs to 1 copy per 10⁴ non-target DNAs, from 1 copy per 10⁴ non-target DNAs to 1 copy per 10⁵ non-target DNAs, from 1 copy per 10⁵ non-target DNAs to 1 copy per 10⁶ non-target DNAs, or from 1 copy per 10⁶ non-target DNAs to 1 copy per 10⁷ non-target DNAs.

[0163] Suitable samples include, but are not limited to, saliva, blood, serum, plasma, urine, aspirate, and biopsy samples. Thus, the term “sample” with respect to a patient encompasses blood and other liquid samples of biological origin, solid tissue samples such as a biopsy specimen or tissue cultures or cells derived therefrom and the progeny thereof. The definition also includes samples that have been manipulated in any way after their procurement, such as by treatment with reagents; washed; or enrichment for certain cell populations, such as cancer cells. The definition also includes sample that have been enriched for particular types of molecules, e.g., DNAs. The term “sample” encompasses biological samples such as a clinical sample such as blood, plasma, serum, aspirate, cerebrospinal fluid (CSF), a bronchoalveolar lavage sample, or sputum; and also includes tissue obtained by surgical resection, tissue obtained by biopsy, cells in culture, cell supernatants, cell lysates, tissue samples, organs, bone marrow, and the like. A “biological sample” includes biological fluids derived therefrom (e.g., cancerous cell, infected cell, etc.), e.g., a sample comprising DNAs that is obtained from such cells (e.g., a cell lysate or other cell extract comprising DNAs).

[0164] A sample can comprise, or can be obtained from, any of a variety of cells, tissues, organs, or acellular fluids. Suitable sample sources include eukaryotic cells, bacterial cells, and archaeal cells. Suitable sample sources include single-celled organisms and multi-cellular organisms. Suitable sample sources include single-cell eukaryotic organisms; a plant or a plant cell; an algal cell, e.g., Botryococcus braunii, Chlamydomonas reinhardtii, Nannochloropsis gaditana, Chlorella pyrenoidosa, Sargassum patens, C. agardh, and the like; a fungal cell (e.g., a yeast cell); an animal cell, tissue, or organ; a cell, tissue, or organ from an invertebrate animal (e g fruit fly, cnidarian, echinoderm, nematode, an insect, an arachnid, etc.); a cell, tissue, fluid, or organ from a vertebrate animal (e g, fish, amphibian, reptile, bird, mammal); a cell, tissue, fluid, or organ from a mammal (e.g., a human; a non-human primate; an ungulate; a feline; a bovine; an ovine; a caprine; etc.). Suitable sample sources include nematodes, protozoans, and the like. Suitable sample sources include parasites such as helminths, malarial parasites, etc.

[0165] Suitable sample sources include a cell, tissue, or organism of any of the six kingdoms, e.g., Bacteria (e.g., Eubacteria); Archaebacteria; Protista; Fungi; Plantae; and Animalia. Suitable sample sources include plant-like members of the kingdom Protista, including, but not limited to, algae (e.g., green algae, red algae, glaucophytes, cyanobacteria); fungus-like members of Protista, e.g., slime molds, water molds, etc; animal-like members of Protista, e.g., flagellates (e.g., Euglena), amoeboids (e.g., amoeba), sporozoans (e.g, Apicomplexa, Myxozoa, Microsporidia), and ciliates (e.g., Paramecium). Suitable sample sources include include members of the kingdom Fungi, including, but not limited to, members of any of the phyla: Basidiomycota (club fungi; e.g., members of Agaricus, Amanita, Boletus, Cantherellus, etc.); Ascomycota (sac fungi, including, e.g., Saccharomyces); Mycophycophyta (lichens); Zygomycota (conjugation fungi); and Deuteromycota. Suitable sample sources include include members of the kingdom Plantae, including, but not limited to, members of any of the following divisions: Bryophyta (e.g., mosses), Anthocerotophyta (e.g., hornworts), Hepaticophyta (e.g., liverworts), Lycophyta (e.g., club mosses), Sphenophyta (e.g., horsetails), Psilophyta (e.g., whisk ferns), Ophioglossophyta, Pterophyta (e.g., ferns), Cycadophyta, Gingkophyta, Pinophyta, Gnetophyta, and Magnoliophyta (e.g., flowering plants). Suitable sample sources include include members of the kingdom Animalia, including, but not limited to, members of any of the following phyla: Porifera (sponges); Placozoa; Orthonectida (parasites of marine invertebrates); Rhombozoa; Cnidaria (corals, anemones, jellyfish, sea pens, sea pansies, sea wasps); Ctenophora (comb jellies); Platyhelminthes (flatworms); Nemertina (ribbon worms); Ngathostomulida (jawed worms)p Gastrotricha; Rotifera; Priapulida; Kinorhyncha; Loricifera; Acanthocephala; Entoprocta; Nemotoda; Nematomorpha; Cycliophora; Mollusca (mollusks); Sipuncula (peanut worms); Annelida (segmented worms); Tardigrada (water bears); Onychophora (velvet worms); Arthropoda (including the subphyla: Chelicerata, Myriapoda, Hexapoda, and Crustacea, where the Chelicerata include, e.g., arachnids, Merostomata, and Pycnogonida, where the Myriapoda include, e.g., Chilopoda (centipedes), Diplopoda (millipedes), Paropoda, and Symphyla, where the Hexapoda include insects, and where the Crustacea include shrimp, krill, barnacles, etc.; Phoronida; Ectoprocta (moss animals); Brachiopoda; Echinodermata (e.g. starfish, sea daisies, feather stars, sea urchins, sea cucumbers, brittle stars, brittle baskets, etc.); Chaetognatha (arrow worms); Hemichordata (acorn worms); and Chordata. Suitable members of Chordata include any member of the following subphyla: Urochordata (sea squirts; including Ascidiacea, Thaliacea, and Larvacea); Cephalochordata (lancelets); Myxini (hagfish); and Vertebrata, where members of Vertebrata include, e.g., members of Petromyzontida (lampreys), Chondrichthyces (cartilaginous fish), Actinopterygii (ray-finned fish), Actinista (coelocanths), Dipnoi (lungfish), Reptilia (reptiles, e.g., snakes, alligators, crocodiles, lizards, etc.), Ayes (birds); and Mammalian (mammals). Suitable plants include any monocotyledon and any dicotyledon.

[0166] Suitable sources of a sample include cells, fluid, tissue, or organ taken from an organism; from a particular cell or group of cells isolated from an organism; etc. For example, where the organism is a plant, suitable sources include xylem, the phloem, the cambium layer, leaves, roots, etc. Where the organism is an animal, suitable sources include particular tissues (e.g., lung, liver, heart, kidney, brain, spleen, skin, fetal tissue, etc.), or a particular cell type (e.g., neuronal cells, epithelial cells, endothelial cells, astrocytes, hepatocytes, cardiac cells, macrophages, glial cells, islet cells, T lymphocytes, B lymphocytes, etc.).

[0167] In some cases, the source of the sample is a (or is suspected of being a diseased cell, fluid, tissue, or organ. In some cases, the source of the sample is a normal (non-diseased) cell, fluid, tissue, or organ. In some cases, the source of the sample is a (or is suspected of being a pathogen-infected cell, tissue, or organ. For example, the source of a sample can be an individual who may or may not be infected—and the sample could be any biological sample (e.g., blood, saliva, biopsy, plasma, serum, bronchoalveolar lavage, sputum, a fecal sample, cerebrospinal fluid, a fine needle aspirate, a swab sample (e.g., a buccal swab, a cervical swab, a nasal swab), interstitial fluid, synovial fluid, nasal discharge, tears, buffy coat, a mucous membrane sample, an epithelial cell sample (e.g., epithelial cell scraping), etc.) collected from the individual. In some cases, the sample is a cell-free liquid sample. In some cases, the sample is a liquid sample that can comprise cells.

[0168] Pathogens include viruses, fungi, helminths, protozoa, malarial parasites, Plasmodium parasites, Toxoplasma parasites, Schistosoma parasites, and the like. “Helminths” include roundworms, heartworms, and phytophagous nematodes (Nematoda), flukes (Tematoda), Acanthocephala, and tapeworms (Cestoda). Protozoan infections include infections from Giardia spp., Trichomonas spp., African trypanosomiasis, amoebic dysentery, babesiosis, balantidial dysentery, Chaga's disease, coccidiosis, malaria and toxoplasmosis. Examples of pathogens such as parasitic/protozoan pathogens include, but are not limited to: Plasmodium falciparum, Plasmodium vivax, Trypanosoma cruzi and Toxoplasma gondii. Fungal pathogens include, but are not limited to: Cryptococcus neoformans, Histoplasma capsulatum, Coccidioides immitis, Blastomyces dermatindis, Chlamydia trachomatis, and Candida albicans. Pathogenic viruses include, e.g., immunodeficiency virus (e.g., HIV); influenza virus; dengue; West Nile virus; herpes virus; yellow fever virus; Hepatitis Virus C; Hepatitis Virus A; Hepatitis Virus B; papillomavirus; and the like. Pathogenic viruses can include DNA viruses such as: a papovavirus (e.g., human papillomavirus (HPV), polyomavirus); a hepadnavirus (e.g., Hepatitis B Virus (HBV)); a herpesvirus (e.g., herpes simplex virus (HSV), varicella zoster virus (VZV), epstein-barr virus (EBV), cytomegalovirus (CMV), herpes lymphotropic virus, Pityriasis Rosea, kaposi's sarcoma-associated herpesvirus); an adenovirus (e.g., atadenovirus, aviadenovirus, ichtadenovirus, mastadenovirus, siadenovirus); a poxvirus (e.g., smallpox, vaccinia virus, cowpox virus, monkeypox virus, orf virus, pseudocowpox, bovine papular stomatitis virus; tanapox virus, yaba monkey tumor virus; molluscum contagiosum virus (MCV)); a parvovirus (e.g., adeno-associated virus (AAV), Parvovirus B19, human bocavirus, bufavirus, human parv4 G1); Geminiviridae; Nanoviridae; Phycodnaviridae; and the like. Pathogens can include, e.g., DNAviruses [e.g.: a papovavirus (e.g., human papillomavirus (HPV), polyomavirus); a hepadnavirus (e.g., Hepatitis B Virus (HBV)); a herpesvirus (e.g., herpes simplex virus (HSV), varicella zoster virus (VZV), Epstein-Barr virus (EBV), cytomegalovirus (CMV), herpes lymphotropic virus, Pityriasis Rosea, Kaposi's sarcoma-associated herpesvirus); an adenovirus (e.g., atadenovirus, aviadenovirus, ichtadenovirus, mastadenovirus, siadenovirus); a poxvirus (e.g., smallpox, vaccinia virus, cowpox virus, monkeypox virus, orf virus, pseudocowpox, bovine papular stomatitis virus; tanapox virus, yaba monkey tumor virus; molluscum contagiosum virus (MCV)); a parvovirus (e.g., adeno-associated virus (AAV), Parvovirus B19, human bocavirus, bufavirus, human parv4 G1); Geminiviridae; Nanoviridae; Phycodnaviridae; and the like], Mycobacterium tuberculosis, Streptococcus agalactiae, methicillin-resistant Staphylococcus aureus, Legionella pneumophila, Streptococcus pyogenes, Escherichia coli, Neisseria gonorrhoeae, Neisseria meningitidis, Pneumococcus, Cryptococcus neoformans, Histoplasma capsulatum, Hemophilus influenzae B, Treponema pallidum, Lyme disease spirochetes, Pseudomonas aeruginosa, Mycobacterium leprae, Brucella abortus, rabies virus, influenza virus, cytomegalovirus, herpes simplex virus I, herpes simplex virus II, human serum parvo-like virus, respiratory syncytial virus, varicella-zoster virus, hepatitis B virus, hepatitis C virus, measles virus, adenovirus, human T-cell leukemia viruses, Epstein-Barr virus, murine leukemia virus, mumps virus, vesicular stomatitis virus, Sindbis virus, lymphocytic choriomeningitis virus, wart virus, blue tongue virus, Sendai virus, feline leukemia virus, Reovirus, polio virus, simian virus 40, mouse mammary tumor virus, dengue virus, rubella virus, West Nile virus, Plasmodium falciparum, Plasmodium vivax, Toxoplasma gondii, Trypanosoma rangeli, Trypanosoma cruzi, Trypanosoma rhodesiense, Trypanosoma brucei, Schistosoma mansoni, Schistosoma japonicum, Babesia bovis, Eimeria tenella, Onchocerca volvulus, Leishmania tropica, Mycobacterium tuberculosis, Trichinella spiralis, Theileria parva, Taenia hydatigena, Taenia ovis, Taenia saginata, Echinococcus granulosus, Mesocestoides corti, Mycoplasma arthritidis, M. hyorhinis, M orale, M. arginini, Acholeplasma laidlawii, M. salivarium, and M. pneumoniae.

### Detection

[0169] In some cases, a method of the present disclosure comprises detecting a target DNA in a sample. Type V CRISPR/Cas proteins, e.g., Cas12 proteins such as Cpf1 (Cas12a) and C2c1 (Cas12b) can promiscuously cleave non-targeted single stranded DNA (ssDNA) once activated by detection of a target DNA (double or single stranded). Once a type V CRISPR/Cas effector protein (e.g., a Cas12 protein such as Cas12a, Cas12b, Cas12c, Cas12d, Cas12e) is activated by a guide RNA, which occurs when the guide RNA hybridizes to a target sequence of a target DNA (i.e., the sample includes the targeted DNA), the protein becomes a nuclease that promiscuously cleaves ssDNAs (i.e., the nuclease cleaves non-target ssDNAs, i.e., ssDNAs to which the guide sequence of the guide RNA does not hybridize). Thus, when the target DNA is present in the sample (e.g., in some cases above a threshold amount), the result is cleavage of ssDNAs in the sample, which can be detected using any convenient detection method (e.g., using a labeled single stranded detector DNA).

[0170] Provided are compositions and methods for detecting a target DNA (double stranded or single stranded) in a sample. In some cases, a detector DNA is used that is single stranded (ssDNA) and does not hybridize with the guide sequence of the guide RNA (i.e., the detector ssDNA is a non-target ssDNA). Such methods can include (a) contacting the sample with: (i) a type V CRISPR/Cas effector protein (e.g., a Cas12 protein); (ii) a guide RNA comprising: a region that binds to the type V CRISPR/Cas effector protein, and a guide sequence that hybridizes with the target DNA; and (iii) a detector DNA that is single stranded and does not hybridize with the guide sequence of the guide RNA; and (b) measuring a detectable signal produced by cleavage of the single stranded detector DNA by the type V CRISPR/Cas effector protein, thereby detecting the target DNA. As noted above, once a subject Type V CRISPR/Cas effector protein (e.g., a Cas12 protein such as Cas12a, Cas12b, Cas12c, Cas12d, Cas12e) is activated by a guide RNA, which occurs when the sample includes a target DNA to which the guide RNA hybridizes (i.e., the sample includes the targeted target DNA), the Type V CRISPR/Cas effector protein (e.g., a Cas12 protein such as Cas12a, Cas12b, Cas12c, Cas12d, Cas12e) is activated and functions as an endoribonuclease that non-specifically cleaves ssDNAs (including non-target ssDNAs) present in the sample. Thus, when the targeted target DNA is present in the sample (e.g., in some cases above a threshold amount), the result is cleavage of ssDNA (including non-target ssDNA) in the sample, which can be detected using any convenient detection method (e.g., using a labeled detector ssDNA).

[0171] Also provided are compositions and methods for cleaving single stranded DNAs (ssDNAs) (e.g., non-target ssDNAs). Such methods can include contacting a population of nucleic acids, wherein said population comprises a target DNA and a plurality of non-target ssDNAs, with: (i) a type V CRISPR/Cas effector protein; and (ii) a guide RNA comprising: a region that binds to the type V CRISPR/Cas effector protein, and a guide sequence that hybridizes with the target DNA, wherein the type V CRISPR/Cas effector protein cleaves non-target ssDNAs of said plurality. Such a method can be used, e.g., to cleave foreign ssDNAs (e.g., viral DNAs) in a cell.

[0172] The contacting step of a subject method can be carried out in a composition comprising divalent metal ions. The contacting step can be carried out in an acellular environment, e.g., outside of a cell. The contacting step can be carried out inside a cell. The contacting step can be carried out in a cell in vitro. The contacting step can be carried out in a cell ex vivo. The contacting step can be carried out in a cell in vivo.

[0173] The guide RNA can be provided as RNA or as a nucleic acid encoding the guide RNA (e.g., a DNA such as a recombinant expression vector). The Type V CRISPR/Cas effector protein (e.g., a Cas12 protein such as Cas12a, Cas12b, Cas12c, Cas12d, Cas12e) can be provided as a protein or as a nucleic acid encoding the protein (e.g., an mRNA, a DNA such as a recombinant expression vector). In some cases, two or more (e.g., 3 or more, 4 or more, 5 or more, or 6 or more) guide RNAs can be provided by (e.g., using a precursor guide RNA array, which can be cleaved by the Type V CRISPR/Cas effector protein into individual (“mature”) guide RNAs).

[0174] In some cases (e.g., when contacting with a guide RNA and a Type V CRISPR/Cas effector protein (e.g., a Cas12 protein such as Cas12a, Cas12b, Cas12c, Cas12d, Cas12e)), the sample is contacted for 2 hours or less (e.g., 1.5 hours or less, 1 hour or less, 40 minutes or less, 30 minutes or less, 20 minutes or less, 10 minutes or less, or 5 minutes or less, or 1 minute or less) prior to the measuring step. For example, In some cases, the sample is contacted for 40 minutes or less prior to the measuring step. In some cases, the sample is contacted for 20 minutes or less prior to the measuring step. In some cases, the sample is contacted for 10 minutes or less prior to the measuring step. In some cases, the sample is contacted for 5 minutes or less prior to the measuring step. In some cases, the sample is contacted for 1 minute or less prior to the measuring step. In some cases, the sample is contacted for from 50 seconds to 60 seconds prior to the measuring step. In some cases, the sample is contacted for from 40 seconds to 50 seconds prior to the measuring step. In some cases, the sample is contacted for from 30 seconds to 40 seconds prior to the measuring step. In some cases, the sample is contacted for from 20 seconds to 30 seconds prior to the measuring step. In some cases, the sample is contacted for from 10 seconds to 20 seconds prior to the measuring step.

[0175] A method of the present disclosure for detecting a target DNA (single-stranded or double-stranded) in a sample can detect a target DNA with a high degree of sensitivity. In some cases, a method of the present disclosure can be used to detect a target DNA present in a sample comprising a plurality of DNAs (including the target DNA and a plurality of non-target DNAs), where the target DNA is present at one or more copies per 10⁷ non-target DNAs (e.g., one or more copies per 10⁶ non-target DNAs, one or more copies per 10⁵ non-target DNAs, one or more copies per 10⁴ non-target DNAs, one or more copies per 10³ non-target DNAs, one or more copies per 10² non-target DNAs, one or more copies per 50 non-target DNAs, one or more copies per 20 non-target DNAs, one or more copies per 10 non-target DNAs, or one or more copies per 5 non-target DNAs). In some cases, a method of the present disclosure can be used to detect a target DNA present in a sample comprising a plurality of DNAs (including the target DNA and a plurality of non-target DNAs), where the target DNA is present at one or more copies per 10¹⁸ non-target DNAs (e.g., one or more copies per 10¹⁵ non-target DNAs, one or more copies per 10¹² non-target DNAs, one or more copies per 10⁹ non-target DNAs, one or more copies per 10⁶ non-target DNAs, one or more copies per 10⁵ non-target DNAs, one or more copies per 10⁴ non-target DNAs, one or more copies per 10³ non-target DNAs, one or more copies per 10² non-target DNAs, one or more copies per 50 non-target DNAs, one or more copies per 20 non-target DNAs, one or more copies per 10 non-target DNAs, or one or more copies per 5 non-target DNAs).

[0176] In some cases, a method of the present disclosure can detect a target DNA present in a sample, where the target DNA is present at from one copy per 10⁷ non-target DNAs to one copy per 10 non-target DNAs (e.g., from 1 copy per 10⁷ non-target DNAs to 1 copy per 10² non-target DNAs, from 1 copy per 10⁷ non-target DNAs to 1 copy per 10³ non-target DNAs, from 1 copy per 10⁷ non-target DNAs to 1 copy per 10⁴ non-target DNAs, from 1 copy per 10⁷ non-target DNAs to 1 copy per 10⁵ non-target DNAs, from 1 copy per 10⁷ non-target DNAs to 1 copy per 10⁶ non-target DNAs, from 1 copy per 10⁶ non-target DNAs to 1 copy per 10 non-target DNAs, from 1 copy per 10⁶ non-target DNAs to 1 copy per 10² non-target DNAs, from 1 copy per 10⁶ non-target DNAs to 1 copy per 10³ non-target DNAs, from 1 copy per 10⁶ non-target DNAs to 1 copy per 10⁴ non-target DNAs, from 1 copy per 10⁶ non-target DNAs to 1 copy per 10⁵ non-target DNAs, from 1 copy per 10⁵ non-target DNAs to 1 copy per 10 non-target DNAs, from 1 copy per 10⁵ non-target DNAs to 1 copy per 10² non-target DNAs, from 1 copy per 10⁵ non-target DNAs to 1 copy per 10³ non-target DNAs, or from 1 copy per 10⁵ non-target DNAs to 1 copy per 10⁴ non-target DNAs).

[0177] In some cases, a method of the present disclosure can detect a target DNA present in a sample, where the target DNA is present at from one copy per 10¹⁸ non-target DNAs to one copy per 10 non-target DNAs (e.g., from 1 copy per 10¹⁸ non-target DNAs to 1 copy per 10² non-target DNAs, from 1 copy per 10¹⁵ non-target DNAs to 1 copy per 10² non-target DNAs, from 1 copy per 10¹² non-target DNAs to 1 copy per 10² non-target DNAs, from 1 copy per 10⁹ non-target DNAs to 1 copy per 10² non-target DNAs, from 1 copy per 10⁷ non-target DNAs to 1 copy per 10² non-target DNAs, from 1 copy per 10⁷ non-target DNAs to 1 copy per 10³ non-target DNAs, from 1 copy per 10⁷ non-target DNAs to 1 copy per 10⁴ non-target DNAs, from 1 copy per 10⁷ non-target DNAs to 1 copy per 10⁵ non-target DNAs, from 1 copy per 10⁷ non-target DNAs to 1 copy per 10⁶ non-target DNAs, from 1 copy per 10⁶ non-target DNAs to 1 copy per 10 non-target DNAs, from 1 copy per 10⁶ non-target DNAs to 1 copy per 10² non-target DNAs, from 1 copy per 10⁶ non-target DNAs to 1 copy per 10³ non-target DNAs, from 1 copy per 10⁶ non-target DNAs to 1 copy per 10⁴ non-target DNAs, from 1 copy per 10⁶ non-target DNAs to 1 copy per 10⁵ non-target DNAs, from 1 copy per 10⁵ non-target DNAs to 1 copy per 10 non-target DNAs, from 1 copy per 10⁵ non-target DNAs to 1 copy per 10² non-target DNAs, from 1 copy per 10⁵ non-target DNAs to 1 copy per 10³ non-target DNAs, or from 1 copy per 10⁵ non-target DNAs to 1 copy per 10⁴ non-target DNAs).

[0178] In some cases, a method of the present disclosure can detect a target DNA present in a sample, where the target DNA is present at from one copy per 10⁷ non-target DNAs to one copy per 100 non-target DNAs (e.g., from 1 copy per 10⁷ non-target DNAs to 1 copy per 10² non-target DNAs, from 1 copy per 10⁷ non-target DNAs to 1 copy per 10³ non-target DNAs, from 1 copy per 10⁷ non-target DNAs to 1 copy per 10⁴ non-target DNAs, from 1 copy per 10⁷ non-target DNAs to 1 copy per 10⁵ non-target DNAs, from 1 copy per 10⁷ non-target DNAs to 1 copy per 10⁶ non-target DNAs, from 1 copy per 10⁶ non-target DNAs to 1 copy per 100 non-target DNAs, from 1 copy per 10⁶ non-target DNAs to 1 copy per 10² non-target DNAs, from 1 copy per 10⁶ non-target DNAs to 1 copy per 10³ non-target DNAs, from 1 copy per 10⁶ non-target DNAs to 1 copy per 10⁴ non-target DNAs, from 1 copy per 10⁶ non-target DNAs to 1 copy per 10⁵ non-target DNAs, from 1 copy per 10⁵ non-target DNAs to 1 copy per 100 non-target DNAs, from 1 copy per 10⁵ non-target DNAs to 1 copy per 10² non-target DNAs, from 1 copy per 10⁵ non-target DNAs to 1 copy per 10³ non-target DNAs, or from 1 copy per 10⁵ non-target DNAs to 1 copy per 10⁴ non-target DNAs).

[0179] In some cases, the threshold of detection, for a subject method of detecting a target DNA in a sample, is 10 nM or less. The term “threshold of detection” is used herein to describe the minimal amount of target DNA that must be present in a sample in order for detection to occur. Thus, as an illustrative example, when a threshold of detection is 10 nM, then a signal can be detected when a target DNA is present in the sample at a concentration of 10 nM or more. In some cases, a method of the present disclosure has a threshold of detection of 5 nM or less. In some cases, a method of the present disclosure has a threshold of detection of 1 nM or less. In some cases, a method of the present disclosure has a threshold of detection of 0.5 nM or less. In some cases, a method of the present disclosure has a threshold of detection of 0.1 nM or less. In some cases, a method of the present disclosure has a threshold of detection of 0.05 nM or less. In some cases, a method of the present disclosure has a threshold of detection of 0.01 nM or less. In some cases, a method of the present disclosure has a threshold of detection of 0.005 nM or less. In some cases, a method of the present disclosure has a threshold of detection of 0.001 nM or less. In some cases, a method of the present disclosure has a threshold of detection of 0.0005 nM or less. In some cases, a method of the present disclosure has a threshold of detection of 0.0001 nM or less. In some cases, a method of the present disclosure has a threshold of detection of 0.00005 nM or less. In some cases, a method of the present disclosure has a threshold of detection of 0.00001 nM or less. In some cases, a method of the present disclosure has a threshold of detection of 10 pM or less. In some cases, a method of the present disclosure has a threshold of detection of 1 pM or less. In some cases, a method of the present disclosure has a threshold of detection of 500 fM or less. In some cases, a method of the present disclosure has a threshold of detection of 250 fM or less. In some cases, a method of the present disclosure has a threshold of detection of 100 fM or less. In some cases, a method of the present disclosure has a threshold of detection of 50 fM or less. In some cases, a method of the present disclosure has a threshold of detection of 500 aM (attomolar) or less. In some cases, a method of the present disclosure has a threshold of detection of 250 aM or less. In some cases, a method of the present disclosure has a threshold of detection of 100 aM or less. In some cases, a method of the present disclosure has a threshold of detection of 50 aM or less. In some cases, a method of the present disclosure has a threshold of detection of 10 aM or less. In some cases, a method of the present disclosure has a threshold of detection of 1 aM or less.

[0180] In some cases, the threshold of detection (for detecting the target DNA in a subject method), is in a range of from 500 fM to 1 nM (e.g., from 500 fM to 500 pM, from 500 fM to 200 pM, from 500 fM to 100 pM, from 500 fM to 10 pM, from 500 fM to 1 pM, from 800 fM to 1 nM, from 800 fM to 500 pM, from 800 fM to 200 pM, from 800 fM to 100 pM, from 800 fM to 10 pM, from 800 fM to 1 pM, from 1 pM to 1 nM, from 1 pM to 500 pM, from 1 pM to 200 pM, from 1 pM to 100 pM, or from 1 pM to 10 pM) (where the concentration refers to the threshold concentration of target DNA at which the target DNA can be detected). In some cases, a method of the present disclosure has a threshold of detection in a range of from 800 fM to 100 pM. In some cases, a method of the present disclosure has a threshold of detection in a range of from 1 pM to 10 pM. In some cases, a method of the present disclosure has a threshold of detection in a range of from 10 fM to 500 fM, e.g., from 10 fM to 50 fM, from 50 fM to 100 fM, from 100 fM to 250 fM, or from 250 fM to 500 fM.

[0181] In some cases, the minimum concentration at which a target DNA can be detected in a sample is in a range of from 500 fM to 1 nM (e.g., from 500 fM to 500 pM, from 500 fM to 200 pM, from 500 fM to 100 pM, from 500 fM to 10 pM, from 500 fM to 1 pM, from 800 fM to 1 nM, from 800 fM to 500 pM, from 800 fM to 200 pM, from 800 fM to 100 pM, from 800 fM to 10 pM, from 800 fM to 1 pM, from 1 pM to 1 nM, from 1 pM to 500 pM, from 1 pM to 200 pM, from 1 pM to 100 pM, or from 1 pM to 10 pM). In some cases, the minimum concentration at which a target DNA can be detected in a sample is in a range of from 800 fM to 100 pM. In some cases, the minimum concentration at which a target DNA can be detected in a sample is in a range of from 1 pM to 10 pM.

[0182] In some cases, the threshold of detection (for detecting the target DNA in a subject method), is in a range of from 1 aM to 1 nM (e.g., from 1 aM to 500 pM, from 1 aM to 200 pM, from 1 aM to 100 pM, from 1 aM to 10 pM, from 1 aM to 1 pM, from 100 aM to 1 nM, from 100 aM to 500 pM, from 100 aM to 200 pM, from 100 aM to 100 pM, from 100 aM to 10 pM, from 100 aM to 1 pM, from 250 aM to 1 nM, from 250 aM to 500 pM, from 250 aM to 200 pM, from 250 aM to 100 pM, from 250 aM to 10 pM, from 250 aM to 1 pM, from 500 aM to 1 nM, from 500 aM to 500 pM, from 500 aM to 200 pM, from 500 aM to 100 pM, from 500 aM to 10 pM, from 500 aM to 1 pM, from 750 aM to 1 nM, from 750 aM to 500 pM, from 750 aM to 200 pM, from 750 aM to 100 pM, from 750 aM to 10 pM, from 750 aM to 1 pM, from 1 fM to 1 nM, from 1 fM to 500 pM, from 1 fM to 200 pM, from 1 fM to 100 pM, from 1 fM to 10 pM, from 1 fM to 1 pM, from 500 fM to 500 pM, from 500 fM to 200 pM, from 500 fM to 100 pM, from 500 fM to 10 pM, from 500 fM to 1 pM, from 800 fM to 1 nM, from 800 fM to 500 pM, from 800 fM to 200 pM, from 800 fM to 100 pM, from 800 fM to 10 pM, from 800 fM to 1 pM, from 1 pM to 1 nM, from 1 pM to 500 pM, from 1 pM to 200 pM, from 1 pM to 100 pM, or from 1 pM to 10 pM) (where the concentration refers to the threshold concentration of target DNA at which the target DNA can be detected). In some cases, a method of the present disclosure has a threshold of detection in a range of from 1 aM to 800 aM. In some cases, a method of the present disclosure has a threshold of detection in a range of from 50 aM to 1 pM. In some cases, a method of the present disclosure has a threshold of detection in a range of from 50 aM to 500 fM.

[0183] In some cases, the minimum concentration at which a target DNA can be detected in a sample is in a range of from 1 aM to 1 nM (e.g., from 1 aM to 500 pM, from 1 aM to 200 pM, from 1 aM to 100 pM, from 1 aM to 10 pM, from 1 aM to 1 pM, from 100 aM to 1 nM, from 100 aM to 500 pM, from 100 aM to 200 pM, from 100 aM to 100 pM, from 100 aM to 10 pM, from 100 aM to 1 pM, from 250 aM to 1 nM, from 250 aM to 500 pM, from 250 aM to 200 pM, from 250 aM to 100 pM, from 250 aM to 10 pM, from 250 aM to 1 pM, from 500 aM to 1 nM, from 500 aM to 500 pM, from 500 aM to 200 pM, from 500 aM to 100 pM, from 500 aM to 10 pM, from 500 aM to 1 pM, from 750 aM to 1 nM, from 750 aM to 500 pM, from 750 aM to 200 pM, from 750 aM to 100 pM, from 750 aM to 10 pM, from 750 aM to 1 pM, from 1 fM to 1 nM, from 1 fM to 500 pM, from 1 fM to 200 pM, from 1 fM to 100 pM, from 1 fM to 10 pM, from 1 fM to 1 pM, from 500 fM to 500 pM, from 500 fM to 200 pM, from 500 fM to 100 pM, from 500 fM to 10 pM, from 500 fM to 1 pM, from 800 fM to 1 nM, from 800 fM to 500 pM, from 800 fM to 200 pM, from 800 fM to 100 pM, from 800 fM to 10 pM, from 800 fM to 1 pM, from 1 pM to 1 nM, from 1 pM to 500 pM, from 1 pM to 200 pM, from 1 pM to 100 pM, or from 1 pM to 10 pM). In some cases, the minimum concentration at which a target DNA can be detected in a sample is in a range of from 1 aM to 500 pM. In some cases, the minimum concentration at which a target DNA can be detected in a sample is in a range of from 100 aM to 500 pM.

[0184] In some cases, a subject composition or method exhibits an attomolar (aM) sensitivity of detection. In some cases, a subject composition or method exhibits a femtomolar (fM) sensitivity of detection. In some cases, a subject composition or method exhibits a picomolar (pM) sensitivity of detection. In some cases, a subject composition or method exhibits a nanomolar (nM) sensitivity of detection.

### Kits

[0185] The present disclosure provides a kit for carrying out a method of the present disclosure (e.g., a method of characterizing a target DNA present in a sample).

[0186] In some cases, a kit of the present disclosure comprises:

[0187] A) a type V CRISPR/Cas effector protein;

[0188] B) one or more guide RNAs, where the one or more guide RNAs comprise: i) a region that binds to the type V CRISPR/Cas effector protein; and ii) a guide sequence that hybridizes with the target DNA; and

[0189] C) a double-stranded nucleic acid adapter, where the adapter comprises a 5′ overhang that comprises a stretch of from 3 to 15 contiguous nucleotides that are complementary to a contiguous stretch of nucleotides of the same length in the 5′ overhang of a PAM-distal cleavage product generated by action of the type V CRISPR/Cas effector protein and the one or more guide RNAs on the target DNA.

[0190] In some cases, the kit also includes one or more reagents for determining the nucleotide sequence of a ligation product formed by ligating the adapter and the PAM-distal cleavage product.

[0191] In some cases, the kit also includes one or more reagents for amplifying the target DNA. For example, in some cases, the kit comprises one or more sets of primer pairs.

[0192] In some cases, one or more components of a kit of the present disclosure is lyophilized.

### Examples of Non-Limiting Aspects of the Disclosure

[0193] Aspects, including embodiments, of the present subject matter described above may be beneficial alone or in combination, with one or more other aspects or embodiments. Without limiting the foregoing description, certain non-limiting aspects of the disclosure numbered 1-48 are provided below. As will be apparent to those of skill in the art upon reading this disclosure, each of the individually numbered aspects may be used or combined with any of the preceding or following individually numbered aspects. This is intended to provide support for all such combinations of aspects and is not limited to combinations of aspects explicitly provided below:

[0194] Aspect 1. A method for characterizing a target DNA present in a sample, the method comprising:

[0195] A) contacting the sample with:

[0196] (a) a type V CRISPR/Cas effector protein; and

[0197] (b) one or more guide RNAs, wherein the one or more guide RNAs comprise: i) a region that binds to the type V CRISPR/Cas effector protein; and ii) a guide sequence that hybridizes with the target DNA,

[0198] wherein said contacting generates a protospacer adjacent motif (PAM)-distal cleavage product comprising a 5′ overhang;

[0199] B) ligating a double-stranded nucleic acid adapter to the cleavage product, wherein the adapter comprises a 5′ overhang that comprises a stretch of from 3 to 15 contiguous nucleotides that are complementary to a contiguous stretch of nucleotides of the same length in the 5′ overhang of the PAM-distal cleavage product,

[0200] wherein said ligating generates a ligation product comprising the adapter and the PAM-distal cleavage product; and

[0201] C) determining the nucleotide sequence of the PAM-distal cleavage product present in the ligation product.

[0202] Aspect 2. The method of aspect 1, wherein the type V CRISPR/Cas effector protein is a Cas12 protein.

[0203] Aspect 3. The method of aspect 1, wherein the type V CRISPR/Cas effector protein is a Cas12a (Cpf1) protein.

[0204] Aspect 4. The method of aspect 1, wherein the type V CRISPR/Cas effector protein is a Cas12b (C2c1) protein.

[0205] Aspect 5. The method of aspect 1, wherein the type V CRISPR/Cas effector protein is a Cas12d protein.

[0206] Aspect 6. The method of aspect 1, wherein the type V CRISPR/Cas effector protein is a Cas14a protein.

[0207] Aspect 7. The method of any one of aspects 1-6, wherein the target DNA is single stranded.

[0208] Aspect 8. The method of any one of aspects 1-6, wherein the target DNA is double stranded.

[0209] Aspect 9. The method of any one of aspects 1-8, wherein the target DNA is viral DNA.

[0210] Aspect 10. The method of aspect 9, wherein the target DNA is papovavirus, hepadnavirus, herpesvirus, adenovirus, poxvirus, or parvovirus DNA.

[0211] Aspect 11. The method of any one of aspects 1-8, wherein the target DNA is bacterial DNA.

[0212] Aspect 12. The method of any one of aspects 1-8, wherein the target DNA is tick-borne pathogen DNA.

[0213] Aspect 13. The method of any one of aspects 1-8, wherein the target DNA is multiple drug resistant bacterial DNA.

[0214] Aspect 14. The method of any one of aspects 1-8, wherein the target DNA is DNA of a eukaryotic pathogen.

[0215] Aspect 15. The method of aspect 14, wherein the eukaryotic pathogen is a pathogenic protozoan, a pathogenic fungus, or a pathogenic helminth.

[0216] Aspect 16. The method of aspect 14, wherein the pathogenic protozoan is a Plasmodium spp., a Trypanosoma spp., a Trichomonas spp., an amoeba, a Giardia spp., or a Toxoplama spp.

[0217] Aspect 17. The method of aspect 15, wherein the pathogenic fungus is an Aspergillus spp., a Candida spp., an Epidermophyton spp., a Histoplasma spp., or a Trichphtyon spp.

[0218] Aspect 18. The method of aspect 15, wherein the pathogenic helminth is a nematode or a platyhelminth.

[0219] Aspect 19. The method of aspect 18, wherein the pathogenic helminth is an Ascaris spp., an Echinococcus spp., a Schistosoma spp., a Strongyloides spp., a Taenia spp., or a Trichinella spp.

[0220] Aspect 20. The method of any one of aspects 1-8, wherein the target DNA is fetal DNA.

[0221] Aspect 21. The method of any one of aspects 1-20, comprising contacting the sample with 2 or more guide RNAs, wherein the 2 or more guide RNAs differ from one another in the guide sequence.

[0222] Aspect 22. The method of aspect 21, comprising contacting the sample with from 2 to 10 guide RNAs.

[0223] Aspect 23. The method of any one of aspects 1-22, wherein the sample comprises a cell.

[0224] Aspect 24. The method of any one of aspects 1-22, wherein the sample is a cell lysate.

[0225] Aspect 25. The method of any one of aspects 1-22, wherein the sample is a cell-free sample.

[0226] Aspect 26. The method of any one of aspects 1-22, wherein the sample is blood, serum, plasma, bronchoalveolar lavage, sputum, urine, cerebrospinal fluid, feces, or a biopsy sample.

[0227] Aspect 27. The method of any one of aspects 1-26, comprising amplifying the target DNA prior to said contacting step.

[0228] Aspect 28. The method of aspect 27, wherein said amplifying comprises contacting the sample with 2 or more sets of primer pairs.

[0229] Aspect 29. The method of aspect 28, wherein the 2 or more sets of primer pairs provides for amplification of DNA of a plurality of different pathogens.

[0230] Aspect 30. The method of aspect 27, wherein said amplifying comprises isothermal amplification.

[0231] Aspect 31. The method of any one of aspects 27-30, wherein said amplification comprises contacting the sample with 1 or more pairs of forward and reverse primers, wherein the 1 or more pairs of forward and reverse primers are selected from the forward and reverse primers depicted in any one of SEQ ID Nos: 71 to 6432.

[0232] Aspect 32. The method of any one of aspects 27-30, wherein said amplification comprises contacting the sample with 1 or more pairs of forward and reverse primers, wherein the 1 or more pairs of forward and reverse primers are selected from the forward and reverse primers depicted in any one of SEQ ID Nos: 6433 to 13607.

[0233] Aspect 33. The method of any one of aspects 27-30, wherein said amplification comprises contacting the sample with 1 or more pairs of forward and reverse primers, wherein the 1 or more pairs of forward and reverse primers are selected from the forward and reverse primers depicted in SEQ ID Nos:13608 to 17378.

[0234] Aspect 34. The method of aspect 1, wherein the adapter comprises a 3′ deoxyadenosine overhang.

[0235] Aspect 35. The method of any one of aspects 1-34, wherein sequence determination is carried out by nanopore sequencing.

[0236] Aspect 36. The method of any one of aspects 1-34, wherein the target DNA is present in the sample at a concentration as low as 200 fM.

[0237] Aspect 37. The method of any one of aspects 1-36, further comprising contacting the sample with a detector DNA that is single stranded and does not hybridize with the guide sequence of the guide RNA; and measuring a detectable signal produced by cleavage of the single stranded detector DNA by the type V CRISPR/Cas effector protein, thereby detecting the target DNA

[0238] Aspect 38. The method of aspect 37, wherein the single stranded detector DNA comprises a fluorescence-emitting dye pair.

[0239] Aspect 39. The method of aspect 38, wherein the fluorescence-emitting dye pair is a fluorescence resonance energy transfer (FRET) pair.

[0240] Aspect 40. The method of aspect 39, wherein the fluorescence-emitting dye pair is a quencher/fluor pair.

[0241] Aspect 41. The method of any one of aspects 1-40, wherein the single stranded detector DNA comprises a modified nucleobase, a modified sugar moiety, and/or a modified nucleic acid linkage.

[0242] Aspect 42. A kit for characterizing a target DNA present in a sample, the system comprising:

[0243] A) a type V CRISPR/Cas effector protein;

[0244] B) one or more guide RNAs, wherein the one or more guide RNAs comprise: i) a region that binds to the type V CRISPR/Cas effector protein; and ii) a guide sequence that hybridizes with the target DNA; and

[0245] C) a double-stranded nucleic acid adapter, wherein the adapter comprises a 5′ overhang that comprises a stretch of from 3 to 15 contiguous nucleotides that are complementary to a contiguous stretch of nucleotides of the same length in the 5′ overhang of protospacer adjacent motif (PAM)-distal cleavage product generated by action of the type V CRISPR/Cas effector protein and the one or more guide RNAs on the target DNA.

[0246] Aspect 43. The kit of aspect 42, further comprising one or more reagents for determining the nucleotide sequence of a ligation product formed by ligating the adapter and the PAM-distal cleavage product.

[0247] Aspect 44. The kit of aspect 42 or 43, further comprising one or more reagents for amplifying the target DNA.

[0248] Aspect 45. The kit of aspect 44, comprising one or more sets of primer pairs.

[0249] Aspect 46. The kit of aspect 45, wherein the one or more pairs of forward and reverse primers are selected from the forward and reverse primers depicted in any one of SEQ ID Nos: 71 to 6432.

[0250] Aspect 47. The kit of aspect 45, wherein the one or more pairs of forward and reverse primers are selected from the forward and reverse primers depicted in any one of SEQ ID Nos: 6433 to 13607.

[0251] Aspect 48. The kit of aspect 45, wherein the one or more pairs of forward and reverse primers are selected from the forward and reverse primers depicted in SEQ ID Nos:13608 to 17378.

### EXAMPLES

[0252] The following examples are put forth so as to provide those of ordinary skill in the art with a complete disclosure and description of how to make and use the present invention, and are not intended to limit the scope of what the inventors regard as their invention nor are they intended to represent that the experiments below are all or the only experiments performed. Efforts have been made to ensure accuracy with respect to numbers used (e.g. amounts, temperature, etc.) but some experimental errors and deviations should be accounted for. Unless indicated otherwise, parts are parts by weight, molecular weight is weight average molecular weight, temperature is in degrees Celsius, and pressure is at or near atmospheric. Standard abbreviations may be used, e.g., bp, base pair(s); kb, kilobase(s); pl, picoliter(s); s or sec, second(s); min, minute(s); h or hr, hour(s); aa, amino acid(s); kb, kilobase(s); bp, base pair(s); nt, nucleotide(s); i.m., intramuscular(ly); i.p., intraperitoneal(ly); s.c., subcutaneous(ly); and the like.

### Example 1

[0253] Primers for detecting antibiotic resistant bacteria (e.g., detecting antibiotic resistance genes) were designed as follows:

[0254] 1) Start with the 11,376 gene references (unique accession numbers) in the ARDB database; 2) Use CD-HIT to narrow the references down to 1,079 gene references (each with <95% identity to each other); 3) Design primers using automated algorithm (600 bp fragment size, 300 bp overlap, 50 nt selection window); 4) Remove primers with Tm>2 SD, homopolymeric; 5) Remove any reverse primers that overlap with forward primers.

[0255] This method is depicted schematically in FIG. 9A-9B.

[0256] The genes that were targeted are denoted as follows: (position highlighted in bold, with the corresponding position in the bacterial genome in bold and italics): >gi|108796981|ref|NC0081461|_gi|108797245|ref|YP_637442.1|_aac2i_305541_306162.

### Example 2: Metagenomic Sequencing with Spiked Primer Enrichment (MSSPE)

### Clinical Sample Collection

[0257] Viral cultures of ZIKV (Uganda strain), DENV (type 1), and MS2 bacteriophage were purchased from American Type Culture Collection (ATCC, Manassas Va., USA). Ebola cultures Kikwit strain in TRIzol LS (Thermo Fisher Scientific, Waltham, Mass., USA) was used. Clinical ZIKV serum samples were collected by Central Laboratory of Epidemiology (CLE), IMSS in Mexico City, Mexico. Real-time quantitative reverse transcription PCR (RT-PCR) testing was used for ZIKV detection and viral titer determination by standard curve analysis (Lanciotti et al. (2008) Emerg Infect Dis 14:1232; Sardi et al. (2016) J Clin Microbiol 54:2348). Forward and reverse primers (ZIKV 1086 and ZIKV 1162c, respectively) and Carboxyfluorescein (FAM)-labelled probes (ZIKV 1107-FAM) were used as previously described (Lanciotti et al. (2008) supra). Clinical Ebola samples collected from patients in the 2014 Boende and 2018 North Kivu province outbreaks were used. Clinical HIV and hepatitis C plasma samples were obtained from the UCSF Clinical Microbiology Laboratory (San Francisco, USA). The CSF sample from a patient with POWV meningoencephalitis was provided by Boston Children's Hospital. The CSF sample from a patient from SLEV meningoencephalitis was provided by University of California, Los Angeles (UCLA) Medical Center (Chiu et al. (2017) Emerg Infect Dis 23:1694). Negative plasma sample matrix used as a “no template” control (NTC) was obtained from Golden West Biologicals Inc. (Temecula, Calif., USA).

### MSSPE Viral Spiked Primer Design

[0258] Multiple sequence alignment (MSA) of viral genomes (downloaded from NCBI GenBank as of September 2017) was performed using MAFFT at default parameters (algorithm=“Auto”, scoring matrix=“200PAM/k=2”: gap open penalty=1.53, offset value=0.123) (Katoh et al. (2014) Methods Mol Biol 1079:131-146). An in-house bioinformatics pipeline named “MSSPE-design” was developed on an Ubuntu Linux computational server for automated design of spiked primers. Briefly, the MSA-aligned genomes were partitioned into overlapping 500 nucleotide (nt) segments with 250 nt overlap using PYFASTA (http://pypi.python.org/pypi/pyfasta/). Forward or reverse 13nt primers were selected from 50 nt regions at the ends of each segment by iteratively ranking candidate 13mer (“kmer”) sequences in reverse order by frequency, selecting the top kmer shared by the most segments and not containing any ambiguous nucleotides, and then removing segments sharing that 13mer before repeating the process on the remaining segments. To decrease overall spiked primer costs, the iterations were repeated until the number of remaining segments containing a shared kmer was below a pre-designated threshold (ranging from n=1 for viruses with only a limited number of genomes/genome segments such as CCHF to n=10 for viruses comprising thousands of genomes and multiple genotypes such as DENV). Spiked primers were filtered by removal of primers with melting temperatures (Tm) greater than 2 standard deviations from the mean or that were predicted to self-dimerize or cross-dimerize with a ΔG value of −9 kcals/mol or more negative.

[0259] Spiked primers were ordered and synthesized by Integrated DNA Technologies Inc. (IDT, Coralville, Iowa, USA). Forward or reverse spiked primer oligonucleotides targeting individual viruses were synthesized on a 10 nmole scale in 96-well plates with standard desalting and 6 nm of each individual oligonucleotide were mixed and then resuspended to a final volume of 500 μL in IDTE pH 8.0. Spiked primer panels (ArboV, HFV, and AllV) were designed by mixing the spiked primers for each individual virus in equimolar ratios and then diluting with TE (Tris-EDTA) buffer to the desired concentration.

### Construction of Metagenomic Sequencing Libraries

[0260] Viral RNA was extracted from 200 μL of contrived or clinical patient samples using the EZ1 Advanced XL BioRobot and EZ1 Virus Mini Kit (Qiagen, Redwood City, Calif.), with the exception of EBOV RNA, which was extracted manually in the viral hemorrhagic fever reference laboratory in INRB, Kinshasa using the Direct-zol RNA MiniPrep Kit (Zymo Research, Irvine, Calif.). 25 μL of nucleic acid extract was treated with DNase (3 μL Turbo DNase, 1 μL Baseline, 5 μL Turbo buffer and 16 μL nuclease-free water), and incubated on an Eppendorf ThermoMixer at 37° C., 600 rpm for 30 min. The Zymo RNA Clean and Concentrator kit (Zymo Research, Irvine, Calif.) was used to clean up DNase-treated RNA, and the final RNA was eluted in 32 μL water. The RNA was then mixed with random hexamer (RH) alone (1 μM) or spiked primer plus RH in a 10:1 ratio of spiked primer to RH, and heated to 65° C. for 5 min. The reverse transcription master mix (10 μL SuperScript III buffer, 5 μL dNTP of 12.5 mM, 2.5 μL DTT of 0.1M, 1 μL SuperScript III enzyme) was added to each sample and incubated at 25° C. for 5 min, followed by 42° C. for 30 min and 94° C. for 2 min. After cooling to 10° C., a second-strand synthesis master mix (3.7 μL Sequenase buffer, 0.225 μL Sequenase enzyme and 1.1 μL water) was added to each reaction, followed by a slow 2 min ramp to 37° C. and 8 min incubation. The resulting cDNA was cleaned up using the Zymo DNA Clean and Concentrator kit (Zymo Research, Irvine, Calif.), with the addition of 10 μL linear acrylamide to each sample, and eluted in 10 μL water. Using the Illumina Nextera XT kit, 2.5 μL sample cDNA was incubated at 55° C. for 5 mins in tagmentation mix (10 μL TD buffer and 5 μL ATM enzyme), and immediately neutralized with 2.5 μL NT buffer. 12.5 μL of tagmented DNA was then transferred to reaction tube containing indexing mix (7.5 μL Nextera XT NPM, 2.5 μL N-7xx primer and 2.5 μL S-5xx primer), followed by PCR amplification (72° C. for 3 min, 95° C. for 30 s, followed by 16 cycles of denaturation (95° C. for 10 s), annealing (55° C. for 30 s), and extension (72° C. for 30 s), with a final extension at 72° C. for 5 min). After PCR, 3 μL of PCR product was analyzed by 2% gel electrophoresis to check for library size and band intensity. If no band or only a very faint band was observed on the gel, another round of recovery PCR was performed. For recovery PCR, the library was washed using 0.9×AMPure XT beads (Beckman Coulter, Carlsb ad, CA, USA) and 5 μL clean library was mixed with 45 μL master mix (10 μL buffer, 2.5 μL of 10 uM Nextera general primers (forward 5′AATGATACGGCGACCACCGA3′ (SEQ ID NO:17), reverse 5′CAAGCAGAAGACGGCATACG3′ (SEQ ID NO:18)), 1 μL dNTP, 0.5 μL Phusion DNA polymerase enzyme and 31 μL water), followed by a 95° C. incubation for 30 s and 10 cycles of PCR (95° C. for 30 s denaturation, 60° C. for 30 s annealing, and 72° C. for 30 s extension), with a final extension at 72° C. for 5 min. The final cDNA library was eluted in 20₁.11_, EB buffer after a wash step using 0.9×AMPure beads.

### Metagenomic Sequencing

[0261] The cDNA libraries were quantified using the Qubit fluorometer (Thermo Fisher Scientific) and the sizes of the libraries were measured using Agilent Bioanalyzer (Agilent Technologies, Santa Clara, Calif.). Illumina sequencing was performed on a MiSeq instrument using 150 nt single-end runs according to the manufacturer's protocol. For nanopore, amplified cDNA libraries from Nextera library preparation were end-repaired and ligated with adapter and motor proteins using the 1D Ligation Sequencing Kit (Oxford Nanopore Technologies). Metagenomic libraries for nanopore sequencing were run on R9.4 or R9.5 flow cells, using either a MinION MK1B or GridION X5 instrument (Oxford Nanopore Technologies).

### Capture Probe Enrichment for ZIKV Samples

[0262] The xGen Lockdown Kit (IDT Technologies, Redwood City, Calif.) was used for capture probe enrichment of ZIKV. Briefly, barcoded amplified cDNA libraries corresponding to each sample were mixed in equimolar proportions to generate a 500 ng pooled library. The pooled library was then added to a hybridization mix containing ZIKV xGen Lockdown probes, and the hybridization reaction was performed by incubation at 65° C. for 16 h, followed by streptavidin bead capture for 45 min. Beads containing captured cDNA were re-suspended in an amplification reaction mix (25 μL KAPA HiFi HotStart ReadyMix, 1.25 μL xGen primer and 3.75 μL water), and post-capture PCR was performed (98° C. for 45 s, followed by 10 cycles of denaturing (98° C. for 15 s), annealing (60° C. for 30 s), and extension (72° C. for 30 s), with a final extension at 72° C. for 1 min). PCR amplicons were purified using 1.5× volume of AMPure XP beads and finally eluted in 20 μL EB buffer. Purified PCR products were analyzed by 2% gel electrophoresis to check library size, and DNA concentration was estimated using the Qubit fluorometer. The capture probe enriched library was run on an Illumina MiSeq instrument using 150 nt single-end runs according to the manufacturer's protocol.

### Tiling Multiplex PCR Enrichment for ZIKV

[0263] Tiling multiplex PCR for ZIKV enrichment was performed according to the “Primal” protocol described by Quick et. al (2017) Nat Protoc 12:1261, except for libraries prepared using both MSSPE and tiling multiplex PCR, for which an AMPure bead wash of 1.2× was performed immediately after cDNA synthesis (before adding multiplexed primers) to remove residual ZIKV MSSPE primers (4 μM) that had been added during the reverse transcription step. After visualization of a PCR band of the expected size (400 nt) by 2% gel electrophoresis, barcoded sequencing libraries were prepared using the NEBNext Ultra II DNA Library Preparation Kit (New England BioLabs, Inc., Ipswich, Mass.), and sequenced on an Illumina MiSeq instrument using 250 nt paired-end runs according to the manufacturer's protocol.

### Bioinformatics Pipelines for Viral Detection and Reference Genome Alignment

[0264] Sequencing data from Illumina MiSeq or HiSeq instruments were analyzed for viruses using the SURPI+(“sequence based ultra-rapid pathogen identification”) computational pipeline (UCSF), a modified version of a previously published bioinformatics analysis pipeline for pathogen identification from mNGS sequence data (Naccache et al. (2014) Genome Res 24:1180). Specifically, the SURPI+ pipeline modifications include (i) updated reference databases based on the NCBI nt database (March 2015 build), (ii) a filtering algorithm for exclusion of false-positive hits from database misannotations, and (iii) taxonomic classification for species-level identification. Viral reads were mapped to reference genome and percent coverage determined an in-house developed SURPIviz graphical visualization interface or Geneious software v10 (Kearse et al. (2012) Bioinformatics 28:1647). For virus detection from nanopore reads, an in-house developed pipeline called SURPIrt (SURPI “real-time”, unpublished), which identifies viral reads by Bowtie2 alignment (Langmead, 2012 #47) to the NCBI Viral RefSeq database or the viral portion of the NCBI nt database, was used. Viral reads obtained by nanopore sequencing were mapped to reference genomes using GraphMap (Sovic et al. (2016) Nat Commun 7:11307).

### Quantification and Statistical Analysis

[0265] The RPM (reads per million) metric was calculated as the number of viral species-specific reads divided by the number of preprocessed reads (reads remaining after adapter trimming, low-quality filtering, and low-complexity filtering of raw reads) for Illumina sequencing, or the number of viral species-specific reads divided by the number of basecalled reads for nanopore sequencing. The fold change for MSSPE enrichment was defined as the RPM obtained for a target virus using MSSPE divided by the RPM obtained using RH priming only. The median fold change is given instead of the mean fold change if the data contained outliers. The percent increase in genome coverage is the genome coverage obtained using RH alone subtracted from that obtained using MSSPE. Chi-squared test was used to compare two proportions, and p value less than 0.05 is considered statistically significant.

### Results

[0266] A general method was developed for viral enrichment and genome recovery from clinical samples for use in diagnostics, public health surveillance, and outbreak investigation. The method is (i) applicable for any targeted virus, regardless of its degree of representation in reference databases (e.g. from 60 to 3,571 reference genomes/genome segments) (FIG. 10A), (ii) preserves broad metagenomic sensitivity for comprehensive detection of known and novel pathogens (viral and non-viral) and co-infections, (iii) does not affect overall turnaround times for sample processing, and (iv) enriches mNGS libraries sufficiently to allow robust viral genome recovery from low-titer clinical samples. An automated computational algorithm was designed that took as input an arbitrary set of reference genomes and constructed a minimal panel of short, 13-nt spiked primers covering these genomes (FIG. 10A), to be added during the cDNA synthesis (reverse transcription step of mNGS library preparation (FIG. 10B). Spiked primers were designed for 14 viruses, in total comprising 6,102 primers and including vector-borne and/or hemorrhagic fever viruses of public health significance.

[0267] FIG. 10A depicts an algorithm for design of viral spiked primers. A set of viral reference genomes (60 to 3,571) were aligned using MAFFT multiple sequence alignment software (Katoh et al. (2014) supra), followed by partitioning of each genome into 300-500 nucleotide (nt) overlapping segments. Forward and reverse 13nt primers (“kmers”) were selected and filtered according to specific criteria (rounded rectangular box). Using this algorithm, primers were designed for 14 RNA viruses. Spiked primer panels for arboviruses (ArboV SP; n=4), hemorrhagic fever viruses (HFV SP; n=6), and all virus (ARV SP; n=13, excluding HCV) were also constructed. FIG. 10B depicts a metagenomic sequencing workflow. MSSPE primers are added (“spiked”) to the reaction mix during the reverse transcription step of cDNA synthesis, without adding to the overall turnaround time for the library preparation and sequencing analysis protocols. The MSSPE workflow is compatible with subsequent enrichment using tiling multiplex PCR and/or capture probes (dotted lines). Metagenomic sequence data is analyzed for pathogen identification using SURPI software (Naccache et al. (2014) supra).

[0268] The performance of the spiked primer panels was evaluated on the MinION portable nanopore sequencing platform (Oxford Nanopore Technologies, Oxford, UK). The results are shown in the table provided in FIG. 11. As shown in FIG. 11, overall levels of ZIKV, EBOV, and DENV enrichment at viral titers ranging from 10-1,000 copies/mL were comparable for the two platforms (median enrichment of 7.8× on the MinION and 9.2× on the Illumina MiSeq). The use of spiked primer panels enabled detection of ZIKV and EBOV down to 10 copies/mL, near the limits of detection for virus-specific PCR (Cherpillod et al. (2016) J Clin Virol 77:9; Corman et al. (2016) Bull World Health Organ 94:880), whereas no ZIKV or EBOV reads were obtained by mNGS using RH primers alone.

[0269] It was hypothesized that the increased proportion of viral reads obtained using the MSSPE method would improve genome coverage. Using ZIKV spiked primers on plasma samples spiked with 1,000 copies/mL of ZIKV more than doubled the genome coverage obtained using RH primers only, from 35.8% to 72.8%. The performance of virus-specific primers for genome sequencing of ZIKV, DENV, EBOV, HIV-1 (divergent and recombinant strains from Cameroon and DRC, Africa), and HCV (genotypes 2, 4, and 6 from California, United States) was evaluated. The data are presented in the table provided in FIG. 12. As shown in the table presented in FIG. 12, on average, a 49% (±13.9% SD) increase in genome coverage was achieved using spiked primer relative to RH primers only for contrived ZIKV, DENV, HIV and EBOV samples at titers of 100-1,000 copies/mL, and a 42% (±15.0% SD) increase in genome coverage for clinical HIV-1 and HCV samples at titers ranging from 100-10,000 copies/mL Similarly, a 36.5% (±16.8% SD) increase in genome coverage was obtained using spiked primer panels (ArboV, HFV, and ARV) for contrived and clinical samples of ZIKV, DENV, and EBOV. No significant gains in genome coverage were observed at a titer of 10 copies/mL, a finding attributed to insufficient sequencing depth. In addition, we tested the MSSPE method using EBOV and DENV spiked for genome recovery on the MinION nanopore sequencer. With contrived samples at a titer of 1,000 copies/mL, comparable percentage increases in genome coverage were achieved on both ONT MinION nanopore and Illumina MiSeq sequencing platforms.

[0270] To assess the utility of MSSPE for pathogen discovery, it was tested whether spiked primers could enrich for sequences from emerging flaviviruses in clinical samples from infected patients. Of note, flaviviruses had not been specifically targeted in the initial spiked primer design. ZIKV spiked primers were used to enrich for St. Louis encephalitis (SLEV), whereas ArboV panel spiked primers were used to enrich for Powassan virus (POWV) in patient cerebrospinal fluid (CSF) samples. As shown in the table presented in FIG. 13, use of ZIKV spiked primers enriched the number of reads to SLEV by ˜3×, with a corresponding increase in 17.5% genome coverage. In CSF from a patient with tick-borne POWV meningoencephalitis, the use of ArboV spiked primers enriched for POWV reads by 15× over RH primers alone, and improved viral genome coverage by 43%. FIG. 13.

[0271] An HIV clinical sample was initially found to harbor Usutu virus (USUV), a flavivirus, by MSSPE using HIV-1 spiked primers. Interestingly, the degree of enrichment for USUV using these HIV-1 spiked primers over RH primers alone was 6×; subsequent analysis of the HIV-1 spiked primers found that 18 of them aligned incidentally to the USUV genome with 0 or 1 mismatches (92.3% or 100% identity). Running the same sample on the Illumina MiSeq at a limited throughput of ˜1 million raw reads resulted in detection of no USUV reads with RH primers alone, but 6 reads with the use of ArboV primers. Deeper sequencing on the Illumina HiSeq of ˜123 million reads revealed that the degree of enrichment of USUV reads using the ArboV panel was 7× (FIG. 13), with a corresponding increase in genome coverage of 25.6%.

[0272] Head-to-head comparisons were performed of MSSPE with both capture probe (Naccache et al. (2016) Emerg Infect Dis 22:1788) and tiling multiplex PCR (Quick et al. (2017) Nat Protoc 12:1261) methods for enrichment of viral reads from ZIKV-positive clinical samples at low titers (310-28,200 copies/mL). The degree of improvement in genome coverage using MSSPE was comparable to capture probe and tiling multiplex PCR methods. However, a small amount of cross-contamination was observed using capture probe and multiplex PCR, versus no cross-contamination using MSSPE. Tiling multiplex PCR for ZIKV was negative when testing a contrived ZIKV sample containing the 1947 prototype Uganda strain, likely due to sequence divergence from the Asian lineage reference genomes from the 2014-2016 ZIKV outbreak in the Americas that were used in the initial multiplex PCR primer design (Quick et al. (2017) supra).

[0273] The performance of MSSPE followed by subsequent tiling multiplex PCR or capture probe enrichment on low-titer contrived and clinical ZIKV samples (666-3,340 copies/mL) was evaluated. The use of spiked primers further increased the number of ZIKV reads by 3×-5× and corresponding genome coverage by 25%-80% (average 58.5±21.5%), as compared to RH primers alone. MSSPE was critical for ZIKV genome recovery in the two samples tested by tiling multiplex PCR, as multiplex PCR with the standard RH priming failed to yield a distinct band on gel electrophoresis, likely due to low abundance of virus in the samples.

[0274] While the present invention has been described with reference to the specific embodiments thereof, it should be understood by those skilled in the art that various changes may be made and equivalents may be substituted without departing from the true spirit and scope of the invention. In addition, many modifications may be made to adapt a particular situation, material, composition of matter, process, process step or steps, to the objective, spirit and scope of the present invention. All such modifications are intended to be within the scope of the claims appended hereto.

What is claimed is:

1. A method for characterizing a target DNA present in a sample, the method comprising:
A) contacting the sample with:
(a) a type V CRISPR/Cas effector protein; and
(b) one or more guide RNAs, wherein the one or more guide RNAs comprise: i) a region that binds to the type V CRISPR/Cas effector protein; and ii) a guide sequence that hybridizes with the target DNA,
wherein said contacting generates a protospacer adjacent motif (PAM)-distal cleavage product comprising a 5′ overhang;
B) ligating a double-stranded nucleic acid adapter to the cleavage product, wherein the adapter comprises a 5′overhang that comprises a stretch of from 3 to 15 contiguous nucleotides that are complementary to a contiguous stretch of nucleotides of the same length in the 5′ overhang of the PAM-distal cleavage product,
wherein said ligating generates a ligation product comprising the adapter and the PAM-distal cleavage product; and
C) determining the nucleotide sequence of the PAM-distal cleavage product present in the ligation product.

2. The method of claim 1, wherein the type V CRISPR/Cas effector protein is a Cas protein selected from the group consisting of a Cas12 protein, a Cas12a (Cpf1) protein, a Cas12b (C2c1) protein, a Cas12d protein, and a Cas14a protein.

3. The method of claim 1, wherein the target DNA is single stranded.

4. The method of claim 1, wherein the target DNA is double stranded.

5. The method of claim 1, wherein the target DNA is viral DNA.

6. The method of claim 5, wherein the target DNA is papovavirus, hepadnavirus, herpesvirus, adenovirus, poxvirus, or parvovirus DNA.

7. The method of claim 1, wherein the target DNA is bacterial DNA.

8. The method of claim 1, wherein the target DNA is from tick-borne pathogen DNA.

9. The method of claim 1, wherein the target DNA is from multiple drug resistant bacterial DNA.

10. The method of claim 1, wherein the target DNA is DNA of a eukaryotic pathogen.

11. The method of claim 10, wherein the eukaryotic pathogen is a pathogenic protozoan, a pathogenic fungus, or a pathogenic helminth.

12. The method of claim 10, wherein the pathogenic protozoan is a Plasmodium spp., a Trypanosoma spp., a Trichomonas spp., an amoeba, a Giardia spp., or a Toxoplama spp.

13. The method of claim 11, wherein the pathogenic fungus is an Aspergillus spp., a Candida spp., an Epidermophyton spp., a Histoplasma spp., or a Trichphtyon spp.

14. The method of claim 11, wherein the pathogenic helminth is a nematode or a platyhelminth.

15. The method of claim 11, wherein the pathogenic helminth is selected from the group consisting of an Ascaris spp., an Echinococcus spp., a Schistosoma spp., a Strongyloides spp., a Taenia spp., and a Trichinella spp.

16. The method of claim 1, wherein the target DNA is fetal DNA.

17. The method of claim 1, comprising contacting the sample with 2 or more guide RNAs, wherein the 2 or more guide RNAs differ from one another in the guide sequence.

18. The method of claim 1, wherein the sample comprises a cell.

19. The method of claim 1, wherein the sample is a cell lysate.

20. The method of claim 1, wherein the sample is a cell-free sample.

21. The method of claim 1, wherein the sample is blood, serum, plasma, bronchoalveolar lavage, sputum, urine, cerebrospinal fluid, feces, or a biopsy sample.

22. The method of claim 1, comprising amplifying the target DNA prior to said contacting step.

23. The method of claim 22, wherein said amplifying comprises contacting the sample with 2 or more sets of primer pairs.

24. The method of claim 22, wherein said amplifying comprises isothermal amplification.

25. The method of claim 27, wherein said amplification comprises contacting the sample with 1 or more pairs of forward and reverse primers, wherein the 1 or more pairs of forward and reverse primers are selected from the forward and reverse primers set forth in SEQ ID Nos: 71 to 6432.

26. The method of claim 27, wherein said amplification comprises contacting the sample with 1 or more pairs of forward and reverse primers, wherein the 1 or more pairs of forward and reverse primers are selected from the forward and reverse primers set forth in SEQ ID Nos: 6433 to 13607.

27. The method of claim 27, wherein said amplification comprises contacting the sample with 1 or more pairs of forward and reverse primers, wherein the 1 or more pairs of forward and reverse primers are selected from the forward and reverse primers set forth in SEQ ID Nos:13608 to 17378.

28. The method of claim 1, wherein the adapter comprises a 3′ deoxyadenosine overhang.

29. The method of claim 1, wherein sequence determination is carried out by nanopore sequencing.

30. The method of claim 1, wherein the target DNA is present in the sample at a concentration as low as 200 fM.

31. The method of claim 1, further comprising contacting the sample with a detector DNA that is single stranded and does not hybridize with the guide sequence of the guide RNA; and measuring a detectable signal produced by cleavage of the single stranded detector DNA by the type V CRISPR/Cas effector protein, thereby detecting the target DNA

32. The method of claim 31, wherein the single stranded detector DNA comprises a fluorescence-emitting dye pair.

33. The method of claim 32, wherein the fluorescence-emitting dye pair is a fluorescence resonance energy transfer (FRET) pair.

34. The method of claim 33, wherein the fluorescence-emitting dye pair is a quencher/fluor pair.

35. The method of claim 31, wherein the single stranded detector DNA comprises a modified nucleobase, a modified sugar moiety, and/or a modified nucleic acid linkage.

36. A kit for characterizing a target DNA present in a sample, the system comprising:
A) a type V CRISPR/Cas effector protein;
B) one or more guide RNAs, wherein the one or more guide RNAs comprise: i) a region that binds to the type V CRISPR/Cas effector protein; and ii) a guide sequence that hybridizes with the target DNA; and
C) a double-stranded nucleic acid adapter, wherein the adapter comprises a 5′overhang that comprises a stretch of from 3 to 15 contiguous nucleotides that are complementary to a contiguous stretch of nucleotides of the same length in the 5′ overhang of protospacer adjacent motif (PAM)-distal cleavage product generated by action of the type V CRISPR/Cas effector protein and the one or more guide RNAs on the target DNA.

37. The kit of claim 36, further comprising one or more reagents for determining the nucleotide sequence of a ligation product formed by ligating the adapter and the PAM-distal cleavage product.

38. The kit of claim 36, further comprising one or more reagents for amplifying the target DNA.

39. The kit of claim 38, comprising one or more sets of primer pairs.

40. The kit of claim 39, wherein the one or more pairs of forward and reverse primers are selected from the forward and reverse primers set forth in SEQ ID Nos: 71 to 17378.

The application's sequence listing, which the Patent Office published only in electronic form, follows.

SEQUENCE LISTING (17378 sequences)

SEQ ID NO: 1 - protein, 7 aa, Artificial Sequence
  synthetic sequence
PKKKRKV

SEQ ID NO: 2 - protein, 16 aa, Artificial Sequence
  synthetic sequence
KRPAATKKAGQAKKKK

SEQ ID NO: 3 - protein, 9 aa, Artificial Sequence
  synthetic sequence
PAAKRVKLD

SEQ ID NO: 4 - protein, 11 aa, Artificial Sequence
  synthetic sequence
RQRRNELKRSP

SEQ ID NO: 5 - protein, 38 aa, Artificial Sequence
  synthetic sequence
NQSSNFGPMKGGNFGGRSSGPYGGGGQYFAKPRNQGGY

SEQ ID NO: 6 - protein, 42 aa, Artificial Sequence
  synthetic sequence
RMRIZFKNKGKDTAELRRRRVEVSVELRKAKKDEQILKRRNV

SEQ ID NO: 7 - protein, 8 aa, Artificial Sequence
  synthetic sequence
VSRKRPRP

SEQ ID NO: 8 - protein, 8 aa, Artificial Sequence
  synthetic sequence
PPKKARED

SEQ ID NO: 9 - protein, 8 aa, Artificial Sequence
  synthetic sequence
PQPKKKPL

SEQ ID NO: 10 - protein, 12 aa, Artificial Sequence
  synthetic sequence
SALIKKKKKMAP

SEQ ID NO: 11 - protein, 5 aa, Artificial Sequence
  synthetic sequence
DRLRR

SEQ ID NO: 12 - protein, 7 aa, Artificial Sequence
  synthetic sequence
PKQKKRK

SEQ ID NO: 13 - protein, 10 aa, Artificial Sequence
  synthetic sequence
RKLKKKIKKL

SEQ ID NO: 14 - protein, 10 aa, Artificial Sequence
  synthetic sequence
REKKKFLKRR

SEQ ID NO: 15 - protein, 20 aa, Artificial Sequence
  synthetic sequence
KRKGDEVDGVDEVAKKKSKK

SEQ ID NO: 16 - protein, 17 aa, Artificial Sequence
  synthetic sequence
RKCLQAGMNLEARKTKK

SEQ ID NO: 17 - DNA, 20 bp, Artificial Sequence
  synthetic sequence
aatgatacggcgaccaccga

SEQ ID NO: 18 - DNA, 20 bp, Artificial Sequence
  synthetic sequence
caagcagaagacggcatacg

SEQ ID NO: 19 - DNA, 55 bp, Artificial Sequence
  synthetic sequence
gcttgtggccgtttacgtcgccgtccagctcgaccaggatgggcaccaccccggc

SEQ ID NO: 20 - DNA, 55 bp, Artificial Sequence
  synthetic sequence
cgaacaccggcaaatgcagcggcaggtcgagctggtcctacccgtggtggggccg

SEQ ID NO: 21 - DNA, 29 bp, Artificial Sequence
  synthetic sequence
aacacaaggagacgcgccgccagccgacc

SEQ ID NO: 22 - DNA, 29 bp, Artificial Sequence
  synthetic sequence
gcttgtggccgtttacgtcgccgtccagc

SEQ ID NO: 23 - DNA, 39 bp, Artificial Sequence
  synthetic sequence
cgaacaccggcaaatgcagcggcaggtcgagctggtcct

SEQ ID NO: 24 - DNA, 26 bp, Artificial Sequence
  synthetic sequence
tcgaccaggatgggcaccaccccggc

SEQ ID NO: 25 - DNA, 16 bp, Artificial Sequence
  synthetic sequence
acccgtggtggggccg

SEQ ID NO: 26 - DNA, 29 bp, Artificial Sequence
  synthetic sequence
aacacaaggagacgcgccgccagccgacc

SEQ ID NO: 27 - DNA, 42 bp, Artificial Sequence
  synthetic sequence
acccgtggtggggccgtcgaccaggatgggcaccaccccggc

SEQ ID NO: 28 - DNA, 43 bp, Artificial Sequence
  synthetic sequence
atgggcaccaccccggcagctggtcctacccgtggtggggccg

SEQ ID NO: 29 - RNA, 41 nt, Artificial Sequence
  Synthetic sequence
uaauuucuacuaaguguagauaucauggcucagauugaacg

SEQ ID NO: 30 - RNA, 41 nt, Artificial Sequence
  Synthetic sequence
uaauuucuacuaaguguagaucaacccgaaggccuucuuca

SEQ ID NO: 31 - RNA, 41 nt, Artificial Sequence
  Synthetic sequence
uaauuucuacuaaguguagaucgcccaguaauuccgauuaa

SEQ ID NO: 32 - RNA, 41 nt, Artificial Sequence
  Synthetic sequence
uaauuucuacuaaguguagaucggcguggacuaccagggua

SEQ ID NO: 33 - RNA, 41 nt, Artificial Sequence
  Synthetic sequence
uaauuucuacuaaguguagauauucgaugcaacgcgaagaa

SEQ ID NO: 34 - RNA, 41 nt, Artificial Sequence
  Synthetic sequence
uaauuucuacuaaguguagauacaacacgagcugacgacag

SEQ ID NO: 35 - DNA, 50 bp, Artificial Sequence
  synthetic sequence
agctgacgtgtactccagcgtctcatctatgcgtcagcagagattctgct

SEQ ID NO: 36 - DNA, 60 bp, Artificial Sequence
  synthetic sequence
ccagcgttcagcagaatctctgctgacgcatagatgagacgctggagtacacgtcagcta

SEQ ID NO: 37 - DNA, 60 bp, Artificial Sequence
  synthetic sequence
gtatgaagaagcagaatctctgctgacgcatagatgagacgctggagtacacgtcagcta

SEQ ID NO: 38 - DNA, 60 bp, Artificial Sequence
  synthetic sequence
cgttaatcgagcagaatctctgctgacgcatagatgagacgctggagtacacgtcagcta

SEQ ID NO: 39 - DNA, 59 bp, Artificial Sequence
  synthetic sequence
ggttcttcagcagaatctctgctgacgcatagatgagacgctggagtacacgtcagcta

SEQ ID NO: 40 - DNA, 60 bp, Artificial Sequence
  synthetic sequence
tggctgtcgagcagaatctctgctgacgcatagatgagacgctggagtacacgtcagcta

SEQ ID NO: 41 - protein, 1129 aa, Alicyclobacillus acidoterrestris
MAVKSIKVKLRLDDMPEIRAGLWKLHKEVNAGVRYYTEWLSLLRQENLYRRSPNGDGEQECDKTAEECKAELLERLRARQVENGHRGPAGSDDELLQLARQLYELLVPQAIGAKGDAQQIARKFLSPLADKDAVGGLGIAKAGNKPRWVRMREAGEPGWEEEKEKAETRKSADRTADVLRALADFGLKPLMRVYTDSEMSSVEWKPLRKGQAVRTWDRDMFQQAIERMMSWESWNQRVGQEYAKLVEQKNRFEQKNFVGQEHLVHLVNQLQQDMKEASPGLESKEQTAHYVTGRALRGSDKVFEKWGKLAPDAPFDLYDAEIKNVQRRNTRRFGSHDLFAKLAEPEYQALWREDASFLTRYAVYNSILRKLNHAKMFATFTLPDATAHPIWTRFDKLGGNLHQYTFLFNEFGERRHAIRFHKLLKVENGVAREVDDVTVPISMSEQLDNLLPRDPNEPIALYFRDYGAEQHFTGEFGGAKIQCRRDQLAHMHRRRGARDVYLNVSVRVQSQSEARGERRPPYAAVFRLVGDNHRAFVHFDKLSDYLAEHPDDGKLGSEGLLSGLRVMSVDLGLRTSASISVFRVARKDELKPNSKGRVPFFFPIKGNDNLVAVHERSQLLKLPGETESKDLRAIREERQRTLRQLRTQLAYLRLLVRCGSEDVGRRERSWAKLIEQPVDAANHMTPDWREAFENELQKLKSLHGICSDKEWMDAVYESVRRVWRHMGKQVRDWRKDVRSGERPKIRGYAKDVVGGNSIEQIEYLERQYKFLKSWSFFGKVSGQVIRAEKGSRFAITLREHIDHAKEDRLKKLADRIIMEALGYVYALDERGKGKWVAKYPPCQLILLEELSEYQFNNDRPPSENNQLMQWSHRGVFQELINQAQVHDLLVGTMYAAFSSRFDARTGAPGIRCRRVPARCTQEHNPEPFPWWLNKFVVEHTLDACPLRADDLIPTGEGEIFVSPFSAEEGDFHQIHADLNAAQNLQQRLWSDFDISQIRLRCDWGEVDGELVLIPRLTGKRTADSYSNKVFYTNTGVTYYERERGKKRRKVFAQEKLSEEEAELLVEADEAREKSVVLMRDPSGIINRGNWTRQKEFWSMVNQRIEGYLVKQIRSRVPLQDSACENTGDI

SEQ ID NO: 42 - protein, 872 aa, Alicyclobacillus contaminans
MGFNTAELLRKVEEEMRKTSVGFDTDNPFAHRITRRAIRGWDRIAEAWRRLPPDAPESEYIEAFKDIQRKNPRKIGSEPLFKNLAAPGVRSELLNNPQVLITFAKYNELQRQLAKAKQFAQKTLPHPVFHPVWVRYDKLGGNLHHYQIEPAVHANDTHKVKFSSLLLPQEDGSYAEVKDVTVSLAPSLQFPTGLVHPKVTTPPRTGLVTVMDEEAGKPVVCYRDRGHDALVPVAFGGAKLQFNRAHLSAGYRKGVLSAGGGGSIYFNVTLDVQVPNERDVSKTFSFSRDRDLVSLKAEELKRYMETKPLGMPGVRVMSVDLGVRYGAAISVFEVKPFAEVRKDKLHYPITGCEGFVAEHERSVILKLPGEGVRTAGKQSERKQALAAIRAEMSILRKWLRVSQVTEEDRAKAVRGLLEDERGGGWTMDPGEDSDHQPLQQFLHEARLAVGELVNLVHLSPAEWERAVIERHRRLERITASHIRVFQTMRKVWGKRRNEDAAHTGGISLAHIEHLIQQRKLFIRWSTHARTYGEVRRLPKHEGFAKRLQKHTNHVKEDRIKKLADMIVMAARGYRFLDKRARWVKTRHAPCDLILFEDLSRYRFTMDRPPTENSQLMNWSHRELLKTVKMQAALFGIGVGTVPAAFTSRFDAQTGAPGLRCKRVTKQDKEKTPFWLIQFAEITGVNVTNVEPGQLIPVDGGEWFVSPKGPRAADGLKCVHADINAAHNLQRRFWIPRLPSVKCRRYVEAEGFAAVPSSTAFMKVHGKGAFVSVDGEFYEYQKGRRVAVNRADRTSSTLDEDEGDIGEEMLVSSNGAGEFVRMFYDESGYVGYGRWMDSKVFWGKVRQIVHRAIQDQVEKRAAARGENGATSSR

SEQ ID NO: 43 - protein, 1149 aa, Desulfovibrio inopinatus
MPTRTINLKLVLGKNPENATLRRALFSTHRLVNQATKRIEEFLLLCRGEAYRTVDNEGKEAEIPRHAVQEEALAFAKAAQRHNGCISTYEDQEILDVLRQLYERLVPSVNENNEAGDAQAANAWVSPLMSAESEGGLSVYDKVLDPPPVWMKLKEEKAPGWEAASQIWIQSDEGQSLLNKPGSPPRWIRKLRSGQPWQDDFVSDQKKKQDELTKGNAPLIKQLKEMGLLPLVNPFFRHLLDPEGKGVSPWDRLAVRAAVAHFISWESWNHRTRAEYNSLKLRRDEFEAASDEFKDDFTLLRQYEAKRHSTLKSIALADDSNPYRIGVRSLRAWNRVREEWIDKGATEEQRVTILSKLQTQLRGKFGDPDLFNWLAQDRHVHLWSPRDSVTPLVRINAVDKVLRRRKPYALMTFAHPRFHPRWILYEAPGGSNLRQYALDCTENALHITLPLLVDDAHGTWIEKKIRVPLAPSGQIQDLTLEKLEKKKNRLYYRSGFQQFAGLAGGAEVLFHRPYMEHDERSEESLLERPGAVWFKLTLDVATQAPPNWLDGKGRVRTPPEVHHFKTALSNKSKHTRTLQPGLRVLSVDLGMRTFASCSVFELIEGKPETGRAFPVADERSMDSPNKLWAKHERSFKLTLPGETPSRKEEEERSIARAEIYALKRDIQRLKSLLRLGEEDNDNRRDALLEQFFKGWGEEDVVPGQAFPRSLFQGLGAAPFRSTPELWRQHCQTYYDKAEACLAKHISDWRKRTRPRPTSREMWYKTRSYHGGKSIWMLEYLDAVRKLLLSWSLRGRTYGAINRQDTARFGSLASRLLHHINSLKEDRIKTGADSIVQAARGYIPLPHGKGWEQRYEPCQLILFEDLARYRFRVDRPRRENSQLMQWNHRAIVAETTMQAELYGQIVENTAAGFSSRFHAATGAPGVRCRFLLERDFDNDLPKPYLLRELSWMLGNTKVESEEEKLRLLSEKIRPGSLVPWDGGEQFATLHPKRQTLCVIHADMNAAQNLQRRFFGRCGEAFRLVCQPHGDDVLRLASTPGARLLGALQQLENGQGAFELVRDMGSTSQMNRFVMKSLGKKKIKPLQDNNGDDELEDVLSVLPEEDDTGRITVFRDSSGIFFPCNVWIPAKQFWPAVRAMIWKVMASHSLG

SEQ ID NO: 44 - protein, 1194 aa, Desulfonatronum thiodismutans
MVLGRKDDTAELRRALWTTHEHVNLAVAEVERVLLRCRGRSYWTLDRRGDPVHVPESQVAEDALAMAREAQRRNGWPVVGEDEEILLALRYLYEQIVPSCLLDDLGKPLKGDAQKIGTNYAGPLFDSDTCRRDEGKDVACCGPFHEVAGKYLGALPEWATPISKQEFDGKDASHLRFKATGGDDAFFRVSIEKANAWYEDPANQDALKNKAYNKDDWKKEKDKGISSWAVKYIQKQLQLGQDPRTEVRRKLWLELGLLPLFIPVFDKTMVGNLWNRLAVRLALAHLLSWESWNHRAVQDQALARAKRDELAALFLGMEDGFAGLREYELRRNESIKQHAFEPVDRPYVVSGRALRSWTRVREEWLRHGDTQESRKNICNRLQDRLRGKFGDPDVFHWLAEDGQEALWKERDCVTSFSLLNDADGLLEKRKGYALMTFADARLHPRWAMYEAPGGSNLRTYQIRKTENGLWADVVLLSPRNESAAVEEKTFNVRLAPSGQLSNVSFDQIQKGSKMVGRCRYQSANQQFEGLLGGAEILFDRKRIANEQHGATDLASKPGHVWFKLTLDVRPQAPQGWLDGKGRPALPPEAKHFKTALSNKSKFADQVRPGLRVLSVDLGVRSFAACSVFELVRGGPDQGTYFPAADGRTVDDPEKLWAKHERSFKITLPGENPSRKEEIARRAAMEELRSLNGDIRRLKAILRLSVLQEDDPRTEHLRLFMEAIVDDPAKSALNAELFKGFGDDRFRSTPDLWKQHCHFFHDKAEKVVAERFSRWRTETRPKSSSWQDWRERRGYAGGKSYWAVTYLEAVRGLILRWNMRGRTYGEVNRQDKKQFGTVASALLHHINQLKEDRIKTGADMIIQAARGFVPRKNGAGWVQVHEPCRLILFEDLARYRFRTDRSRRENSRLMRWSHREIVNEVGMQGELYGLHVDTTEAGFSSRYLASSGAPGVRCRHLVEEDFHDGLPGMHLVGELDWLLPKDKDRTANEARRLLGGMVRPGMLVPWDGGELFATLNAASQLHVIHADINAAQNLQRRFWGRCGEAIRIVCNQLSVDGSTRYEMAKAPKARLLGALQQLKNGDAPFHLTSIPNSQKPENSYVMTPTNAGKKYRAGPGEKSSGEEDELALDIVEQAEELAQGRKTFFRDPSGVFFAPDRWLPSEIYWSRIRRRIWQVTLERNSSGRQERAEMDEMPY

SEQ ID NO: 45 - protein, 1388 aa, Opitutaceae bacterium
MSLNRIYQGRVAAVETGTALAKGNVEWMPAAGGDEVLWQHHELFQAAINYYLVALLALADKNNPVLGPLISQMDNPQSPYHVWGSFRRQGRQRTGLSQAVAPYITPGNNAPTLDEVFRSILAGNPTDRATLDAALMQLLKACDGAGAIQQEGRSYWPKFCDPDSTANFAGDPAMLRREQHRLLLPQVLHDPAITHDSPALGSFDTYSIATPDTRTPQLTGPKARARLEQAITLWRVRLPESAADFDRLASSLKKIPDDDSRLNLQGYVGSSAKGEVQARLFALLLFRHLERSSFTLGLLRSATPPPKNAETPPPAGVPLPAASAADPVRIARGKRSFVFRAFTSLPCWHGGDNIHPTWKSFDIAAFKYALTVINQIEEKTKERQKECAELETDFDYMHGRLAKIPVKYTTGEAEPPPILANDLRIPLLRELLQNIKVDTALTDGEAVSYGLQRRTIRGFRELRRIWRGHAPAGTVFSSELKEKLAGELRQFQTDNSTTIGSVQLFNELIQNPKYWPIWQAPDVETARQWADAGFADDPLAALVQEAELQEDIDALKAPVKLTPADPEYSRRQYDFNAVSKFGAGSRSANRHEPGQTERGHNTFTTEIAARNAADGNRWRATHVRIHYSAPRLLRDGLRRPDTDGNEALEAVPWLQPMMEALAPLPTLPQDLTGMPVFLMPDVTLSGERRILLNLPVTLEPAALVEQLGNAGRWQNQFFGSREDPFALRWPADGAVKTAKGKTHIPWHQDRDHFTVLGVDLGTRDAGALALLNVTAQKPAKPVHRIIGEADGRTWYASLADARMIRLPGEDARLFVRGKLVQEPYGERGRNASLLEWEDARNIILRLGQNPDELLGADPRRHSYPEINDKLLVALRRAQARLARLQNRSWRLRDLAESDKALDEIHAERAGEKPSPLPPLARDDAIKSTDEALLSQRDIIRRSFVQIANLILPLRGRRWEWRPHVEVPDCHILAQSDPGTDDTKRLVAGQRGISHERIEQIEELRRRCQSLNRALRHKPGERPVLGRPAKGEEIADPCPALLEKINRLRDQRVDQTAHAILAAALGVRLRAPSKDRAERRHRDIHGEYERFRAPADFVVIENLSRYLSSQDRARSENTRLMQWCHRQIVQKLRQLCETYGIPVLAVPAAYSSRFSSRDGSAGFRAVHLTPDHRHRMPWSRILARLKAHEEDGKRLEKTVLDEARAVRGLFDRLDRFNAGHVPGKPWRTLLAPLPGGPVFVPLGDATPMQADLNAAINIALRGIAAPDRHDIHHRLRAENKKRILSLRLGTQREKARWPGGAPAVTLSTPNNGASPEDSDALPERVSNLFVDIAGVANFERVTIEGVSQKFATGRGLWASVKQRAWNRVARLNETVTDNNRNEEEDDIPM

SEQ ID NO: 46 - protein, 1132 aa, Tuberibacillus calidus
MATKSFILKMKTKNNPQLRLSLWKTHELFNFGVAYYMDLLSLFRQKDLYMHNDEDPDHPVVLKKEEIQERLWMKVRETQQKNGFHGEVSKDEVLETLRALYEELVPSAVGKSGEANQISNKYLYPLTDPASQSGKGTANSGRKPRWKKLKEAGDPSWKDAYEKWEKERQEDPKLKILAALQSFGLIPLFRPFTENDHKAVISVKWMPKSKNQSVRKFDKDMFNQAIERFLSWESWNEKVAEDYEKTVSIYESLQKELKGISTKAFEIMERVEKAYEAHLREITFSNSTYRIGNRAIRGWTEIVKKWMKLDPSAPQGNYLDVVKDYQRRHPRESGDFKLFELLSRPENQAAWREYPEFLPLYVKYRHAEQRMKTAKKQATFTLCDPIRHPLWVRYEERSGTNLNKYRLIMNEKEKVVQFDRLICLNADGHYEEQEDVTVPLAPSQQFDDQIKFSSEDTGKGKHNFSYYHKGINYELKGTLGGARIQFDREHLLRRQGVKAGNVGRIFLNVTLNIEPMQPFSRSGNLQTSVGKALKVYVDGYPKVVNFKPKELTEHIKESEKNTLTLGVESLPTGLRVMSVDLGQRQAAAISIFEVVSEKPDDNKLFYPVKDTDLFAVHRTSFNIKLPGEKRTERRMLEQQKRDQAIRDLSRKLKFLKNVLNMQKLEKTDEREKRVNRWIKDREREEENPVYVQEFEMISKVLYSPHSVWVDQLKSIHRKLEEQLGKEISKWRQSISQGRQGVYGISLKNIEDIEKTRRLLFRWSMRPENPGEVKQLQPGERFAIDQQNHLNHLKDDRIKKLANQIVMTALGYRYDGKRKKWIAKHPACQLVLFEDLSRYAFYDERSRLENRNLMRWSRREIPKQVAQIGGLYGLLVGEVGAQYSSRFHAKSGAPGIRCRVVKEHELYITEGGQKVRNQKFLDSLVENNIIEPDDARRLEPGDLIRDQGGDKFATLDERGELVITHADINAAQNLQKRFWTRTHGLYRIRCESREIKDAVVLVPSDKDQKEKMENLFGIGYLQPFKQENDVYKWVKGEKIKGKKTSSQSDDKELVSEILQEASVMADELKGNRKTLFRDPSGYVFPKDRWYTGGRYFGTLEHLLKRKLAERRLFDGGSSRRGLFNGTDSNTNVE

SEQ ID NO: 47 - protein, 658 aa, Methylobacterium nodulans
MLTKQDKQQKITYCTNMNEVFEAKLGSADLLLNWDHLRGRIRDRVDAGDIGSAFLKLALDVAHVLPDGVDDQLARAAFHFQSAKGAKSKHADSVQAGLRVLSIDLGVRSFATCSVFELKDTAPTTGVAFPLAEFRLWAVHERSFTLELPGENVGAAGQQWRAQADAELRQLRGGLNRHRQLLRAATVQKGERDAYLTDLREAWSAKELWPFEASLLSELERCSTVADPLWQDTCKRAARLYRTEFGAVVSEWRSRTRSREDRKYAGKSMWSVQHLTDVRRFLQSWSLAGRASGDIRRLDRERGGVFAKDLLDHIDALKDDRLKTGADLIVQAARGFQRNEFGYWVQKHAPCHVILFEDLSRYRMRTDRPRRENSQLMQWAHRGVPDMVGMQGEIYGIQDRRDPDSARKHARQPLAAFCLDTPAAFSSRYHASTMTPGIRCHPLRKREFEDQGFLELLKRENEGLDLNGYKPGDLVPLPGGEVFVCLNANGLSRIHADINAAQNLQRRFWTQHGDAFRLPCGKSAVQGQIRWAPLSMGKRQAGALGGFGYLEPTGHDSGSCQWRKTTEAEWRRLSGAQKDRDEAAAAEDEELQGLEEELLERSGERVVFFRDPSGVVLPTDLWFPSAAFWSIVRAKTVGRLRSHLDAQAEASYAVAAGL

SEQ ID NO: 48 - protein, 864 aa, Brevibacillus sp.
MPKILRGHKWISLLEQYEENRERELRENMTAANDKYRITKRQMKGWNELYELWSTFPASASHEQYKEALKRVQQRLRGRFGDAHFFQYLMEEKNRLIWKGNPQRIHYFVARNELTKRLEEAKQSATMTLPNARKHPLWVRFDARGGNLQDYYLTAEADKPRSRRFVTFSQLIWPSESGWMEKKDVEVELALSRQFYQQVKLLKNDKGKQKIEFKDKGSGSTFNGHLGGAKLQLERGDLEKEEKNFEDGEIGSVYLNVVIDFEPLQEVKNGRVQAPYGQVLQLIRRPNEFPKVTTYKSEQLVEWIKASPQHSAGVESLASGFRVMSIDLGLRAAAATSIFSVEESSDKNAADFSYWIEGTPLVAVHHRSYMLRLPGEQVEKQVMEKRDERFQLHQRVKFQIRVLAQIMRMANKQYGDRWDELDSLKQAVEQKKSPLDQTDRTFWEGIVCDLTKVLPRNEADWEQAVVQIHRKAEEYVGKAVQAWRKRFAADERKGIAGLSMWNIEELEGLRKLLISWSRRSRNPQEVNRFERGHTSHQRLLTHIQNVKEDRLKQLSHAIVMTALGYVYDERKQEWCAEYPACQVILFENLSQYRSNLDRSTKENSTLMKWAHRSIPKYVHMQAEPYGIQIGDVRAEYSSRFYAKTGTPGIRCKKVRGQDLQGRRFENLQKRLVNEQFLTEEQVKQLRPGDIVPDDSGELFMTLTDGSGSKEVVFLQADINAAHNLQKRFWQRYNELFKVSCRVIVRDEEEYLVPKTKSVQAKLGKGLFVKKSDTAWKDVYVWDSQAKLKGKTTFTEESESPEQLEDFQEIIEEAEEAKGTYRTLFRDPSGVFFPESVWYPQKDFWGEVKRKLYGKLRERFLTKAR

SEQ ID NO: 49 - protein, 1108 aa, Bacillus sp.
MAIRSIKLKLKTHTGPEAQNLRKGIWRTHRLLNEGVAYYMKMLLLFRQESTGERPKEELQEELICHIREQQQRNQADKNTQALPLDKALEALRQLYELLVPSSVGQSGDAQIISRKFLSPLVDPNSEGGKGTSKAGAKPTWQKKKEANDPTWEQDYEKWKKRREEDPTASVITTLEEYGIRPIFPLYTNTVTDIAWLPLQSNQFVRTWDRDMLQQAIERLLSWESWNKRVQEEYAKLKEKMAQLNEQLEGGQEWISLLEQYEENRERELRENMTAANDKYRITKRQMKGWNELYELWSTFPASASHEQYKEALKRVQQRLRGRFGDAHFFQYLMEEKNRLIWKGNPQRIHYFVARNELTKRLEEAKQSATMTLPNARKHPLWVRFDARGGNLQDYYLTAEADKPRSRRFVTFSQLIWPSESGWMEKKDVEVELALSRQFYQQVKLLKNDKGKQKIEFKDKGSGSTFNGHLGGAKLQLERGDLEKEEKNFEDGEIGSVYLNVVIDFEPLQEVKNGRVQAPYGQVLQLIRRPNEFPKVTTYKSEQLVEWIKASPQHSAGVESLASGFRVMSIDLGLRAAAATSIFSVEESSDKNAADFSYWIEGTPLVAVHQRSYMLRLPGEQVEKQVMEKRDERFQLHQRVKFQIRVLAQIMRMANKQYGDRWDELDSLKQAVEQKKSPLDQTDRTFWEGIVCDLTKVLPRNEADWEQAVVQIHRKAEEYVGKAVQAWRKRFAADERKGIAGLSMWNIEELEGLRKLLISWSRRTRNPQEVNRFERGHTSHQRLLTHIQNVKEDRLKQLSHAIVMTALGYVYDERKQEWCAEYPACQVILFENLSQYRSNLDRSTKENSTLMKWAHRSIPKYVHMQAEPYGIQIGDVRAEYSSRFYAKTGTPGIRCKKVRGQDLQGRRFENLQKRLVNEQFLTEEQVKQLRPGDIVPDDSGELFMTLTDGSGSKEVVFLQADINAAHNLQKRFWQRYNELFKVSCRVIVRDEEEYLVPKTKSVQAKLGKGLFVKKSDTAWKDVYVWDSQAKLKGKTTFTEESESPEQLEDFQEIIEEAEEAKGTYRTLFRDPSGVFFPESVWYPQKDFWGEVKRKLYGKLRERFLTKAR

SEQ ID NO: 50 - protein, 1489 aa, Desulfatirhabdium butyrativorans
MPLSNNPPVTQRAYTLRLRGADPSDLSWREALWHTHEAVNKGAKVFGDWLLTLRGGLDHTLADTKVKGGKGKPDRDPTPEERKARRILLALSWLSVESKLGAPSSYIVASGDEPAKDRNDNVVSALEEILQSRKVAKSEIDDWKRDCSASLSAAIRDDAVWVNRSKVFDEAVKSVGSSLTREEAWDMLERFFGSRDAYLTPMKDPEDKSSETEQEDKAKDLVQKAGQWLSSRYGTSEGADFCRMSDIYGKIAAWADNASQGGSSTVDDLVSELRQHFDTKESKATNGLDWIIGLSSYTGHTPNPVHELLRQNTSLNKSHLDDLKKKANTRAESCKSKIGSKGQRPYSDAILNDVESVCGFTYRVDKDGQPVSVADYSKYDVDYKWGTARHYIFAVMLDHAARRISLAHKWIKRAEAERHKFEEDAKRIANVPARAREWLDSFCKERSVTSGAVEPYRIRRRAVDGWKEVVAAWSKSDCKSTEDRIAAARALQDDSEIDKFGDIQLFEALAEDDALCVWHKDGEATNEPDFQPLIDYSLAIEAEFKKRQFKVPAYRHPDELLHPVFCDFGKSRWKINYDVHKNVQAPFYRGLCLTLWTGSEIKPVPLCWQSKRLTRDLALGNNHRNDAASAVTRADRLGRAASNVTKSDMVNITGLFEQADWNGRLQAPRQQLEAIAVVRDNPRLSEQERNLRMCGMIEHIRWLVTFSVKLQPQGPWCAYAEQHGLNTNPQYWPHADTNRDRKVHARLILPRLPGLRVLSVDLGHRYAAACAVWEAVNTETVKEACQNVGRDMPKEHDLYLHIKVKKQGIGKQTEVDKTTIYRRIGADTLPDGRPHPAPWARLDRQFLIKLQGEEKDAREASNEEIWALHQMECKLDRTKPLIDRLIASGWGLLKRQMARLDALKELGWIPAPDSSENLSREDGEAKDYRESLAVDDLMFSAVRTLRLALQRHGNRARIAYYLISEVKIRPGGIQEKLDENGRIDLLQDALALWHELFSSPGWRDEAAKQLWDSRIATLAGYKAPEENGDNVSDVAYRKKQQVYREQLRNVAKTLSGDVITCKELSDAWKERWEDEDQRWKKLLRWFKDWVLPSGTQANNATIRNVGGLSLSRLATITEFRRKVQVGFFTRLRPDGTRHEIGEQFGQKTLDALELLREQRVKQLASRIAEAALGIGSEGGKGWDGGKRPRQRINDSRFAPCHAVVIENLANYRPDETRTRLENRRLMTWSASKVHKYLSEACQLNGLYLCTVSAWYTSRQDSRTGAPGIRCQDVSVREFMQSPFWRKQVKQAEAKHDENKGDARERFLCELNKTWKAKTPAEWKKAGFVRIPLRGGEIFVSADSKSPSAKGIHADLNAAANIGLRALTDPDWPGKWWYVPCDPVSFESKMDYVKGCAAVKVGQPLRQPAQTNADGAASKIRKGKKNRTAGTSKEKVYLWRDISAFPLESNEIGEWKETSAYQNDVQYRVIRMLKEHIKSLDNRTGDNVEG

SEQ ID NO: 51 - protein, 1228 aa, Lachnospiraceae bacterium
MSKLEKFTNCYSLSKTLRFKAIPVGKTQENIDNKRLLVEDEKRAEDYKGVKKLLDRYYLSFINDVLHSIKLKNLNNYISLFRKKTRTEKENKELENLEINLRKEIAKAFKGNEGYKSLFKKDIIETILPEFLDDKDEIALVNSFNGFTTAFTGFFDNRENMFSEEAKSTSIAFRCINENLTRYISNMDIFEKVDAIFDKHEVQEIKEKILNSDYDVEDFFEGEFFNFVLTQEGIDVYNAIIGGFVTESGEKIKGLNEYINLYNQKTKQKLPKFKPLYKQVLSDRESLSFYGEGYTSDEEVLEVFRNTLNKNSEIFSSIKKLEKLFKNFDEYSSAGIFVKNGPAISTISKDIFGEWNVIRDKWNAEYDDIHLKKKAVVTEKYEDDRRKSFKKIGSFSLEQLQEYADADLSVVEKLKEIIIQKVDEIYKVYGSSEKLFDADFVLEKSLKKNDAVVAIMKDLLDSVKSFENYIKAFFGEGKETNRDESFYGDFVLAYDILLKVDHIYDAIRNYVTQKPYSKDKFKLYFQNPQFMGGWDKDKETDYRATILRYGSKYYLAIMDKKYAKCLQKIDKDDVNGNYEKINYKLLPGPNKMLPKVFFSKKWMAYYNPSEDIQKIYKNGTFKKGDMFNLNDCHKLIDFFKDSISRYPKWSNAYDFNFSETEKYKDIAGFYREVEEQGYKVSFESASKKEVDKLVEEGKLYMFQIYNKDFSDKSHGTPNLHTMYFKLLFDENNHGQIRLSGGAELFMRRASLKKEELVVHPANSPIANKNPDNPKKTTTLSYDVYKDKRFSEDQYELHIPIAINKCPKNIFKINTEVRVLLKHDDNPYVIGIDRGERNLLYIVVVDGKGNIVEQYSLNEIINNFNGIRIKTDYHSLLDKKEKERFEARQNWTSIENIKELKAGYISQVVHKICELVEKYDAVIALEDLNSGFKNSRVKVEKQVYQKFEKMLIDKLNYMVDKKSNPCATGGALKGYQITNKFESFKSMSTQNGFIFYIPAWLTSKIDPSTGFVNLLKTKYTSIADSKKFISSFDRIMYVPEEDLFEFALDYKNFSRTDADYIKKWKLYSYGNRIRIFRNPKKNNVFDWEEVCLTSAYKELFNKYGINYQQGDIRALLCEQSDKAFYSSFMALMSLMLQMRNSITGRTDVDFLISPVKNSDGIFYDSRNYEAQENAILPKNADANGAYNIARKVLWAIGQFKKAEDEKLDKVKIAISNKEWLEYAQTSVKH

SEQ ID NO: 52 - protein, 1307 aa, Acidaminococcus sp.
MTQFEGFTNLYQVSKTLRFELIPQGKTLKHIQEQGFIEEDKARNDHYKELKPIIDRIYKTYADQCLQLVQLDWENLSAAIDSYRKEKTEETRNALIEEQATYRNAIHDYFIGRTDNLTDAINKRHAEIYKGLFKAELFNGKVLKQLGTVTTTEHENALLRSFDKFTTYFSGFYENRKNVFSAEDISTAIPHRIVQDNFPKFKENCHIFTRLITAVPSLREHFENVKKAIGIFVSTSIEEVFSFPFYNQLLTQTQIDLYNQLLGGISREAGTEKIKGLNEVLNLAIQKNDETAHIIASLPHRFIPLFKQILSDRNTLSFILEEFKSDEEVIQSFCKYKTLLRNENVLETAEALFNELNSIDLTHIFISHKKLETISSALCDHWDTLRNALYERRISELTGKITKSAKEKVQRSLKHEDINLQEIISAAGKELSEAFKQKTSEILSHAHAALDQPLPTTLKKQEEKEILKSQLDSLLGLYHLLDWFAVDESNEVDPEFSARLTGIKLEMEPSLSFYNKARNYATKKPYSVEKFKLNFQMPTLASGWDVNKEKNNGAILFVKNGLYYLGIMPKQKGRYKALSFEPTEKTSEGFDKMYYDYFPDAAKMIPKCSTQLKAVTAHFQTHTTPILLSNNFIEPLEITKEIYDLNNPEKEPKKFQTAYAKKTGDQKGYREALCKWIDFTRDFLSKYTKTTSIDLSSLRPSSQYKDLGEYYAELNPLLYHISFQRIAEKEIMDAVETGKLYLFQIYNKDFAKGHHGKPNLHTLYWTGLFSPENLAKTSIKLNGQAELFYRPKSRMKRMAHRLGEKMLNKKLKDQKTPIPDTLYQELYDYVNHRLSHDLSDEARALLPNVITKEVSHEIIKDRRFTSDKFFFHVPITLNYQAANSPSKFNQRVNAYLKEHPETPIIGIDRGERNLIYITVIDSTGKILEQRSLNTIQQFDYQKKLDNREKERVAARQAWSVVGTIKDLKQGYLSQVIHEIVDLMIHYQAVVVLENLNFGFKSKRTGIAEKAVYQQFEKMLIDKLNCLVLKDYPAEKVGGVLNPYQLTDQFTSFAKMGTQSGFLFYVPAPYTSKIDPLTGFVDPFVWKTIKNHESRKHFLEGFDFLHYDVKTGDFILHFKMNRNLSFQRGLPGFMPAWDIVFEKNETQFDAKGTPFIAGKRIVPVIENHRFTGRYRDLYPANELIALLEEKGIVFRDGSNILPKLLENDDSHAIDTMVALIRSVLQMRNSNAATGEDYINSPVRDLNGVCFDSRFQNPEWPMDADANGAYHIALKGQLLLNHLKESKDLKLQNGISNQDWLAYIQELRN

SEQ ID NO: 53 - protein, 1300 aa, Francisella novicida
MSIYQEFVNKYSLSKTLRFELIPQGKTLENIKARGLILDDEKRAKDYKKAKQIIDKYHQFFIEEILSSVCISEDLLQNYSDVYFKLKKSDDDNLQKDFKSAKDTIKKQISEYIKDSEKFKNLFNQNLIDAKKGQESDLILWLKQSKDNGIELFKANSDITDIDEALEIIKSFKGWTTYFKGFHENRKNVYSSNDIPTSIIYRIVDDNLPKFLENKAKYESLKDKAPEAINYEQIKKDLAEELTFDIDYKTSEVNQRVFSLDEVFEIANFNNYLNQSGITKFNTIIGGKFVNGENTKRKGINEYINLYSQQINDKTLKKYKMSVLFKQILSDTESKSFVIDKLEDDSDVVTTMQSFYEQIAAFKTVEEKSIKETLSLLFDDLKAQKLDLSKIYFKNDKSLTDLSQQVFDDYSVIGTAVLEYITQQIAPKNLDNPSKKEQELIAKKTEKAKYLSLETIKLALEEFNKHRDIDKQCRFEEILANFAAIPMIFDEIAQNKDNLAQISIKYQNQGKKDLLQASAEDDVKAIKDLLDQTNNLLHKLKIFHISQSEDKANILDKDEHFYLVFEECYFELANIVPLYNKIRNYITQKPYSDEKFKLNFENSTLANGWDKNKEPDNTAILFIKDDKYYLGVMNKKNNKIFDDKAIKENKGEGYKKIVYKLLPGANKMLPKVFFSAKSIKFYNPSEDILRIRNHSTHTKNGSPQKGYEKFEFNIEDCRKFIDFYKQSISKHPEWKDFGFRFSDTQRYNSIDEFYREVENQGYKLTFENISESYIDSVVNQGKLYLFQIYNKDFSAYSKGRPNLHTLYWKALFDERNLQDVVYKLNGEAELFYRKQSIPKKITHPAKEAIANKNKDNPKKESVFEYDLIKDKRFTEDKFFFHCPITINFKSSGANKFNDEINLLLKEKANDVHILSIDRGERHLAYYTLVDGKGNIIKQDTFNIIGNDRMKTNYHDKLAAIEKDRDSARKDWKKINNIKEMKEGYLSQVVHEIAKLVIEYNAIVVFEDLNFGFKRGRFKVEKQVYQKLEKMLIEKLNYLVFKDNEFDKTGGVLRAYQLTAPFETFKKMGKQTGIIYYVPAGFTSKICPVTGFVNQLYPKYESVSKSQEFFSKFDKICYNLDKGYFEFSFDYKNFGDKAAKGKWTIASFGSRLINFRNSDKNHNWDTREVYPTKELEKLLKDYSIEYGHGECIKAAICGESDKKFFAKLTSVLNTILQMRNSKTGTELDYLISPVADVNGNFFDSRQAPKNMPQDADANGAYHIGLKGLMLLGRIKNNQEGKKLNLVIKNEEYFEFVQNRNN

SEQ ID NO: 54 - protein, 1246 aa, Porphyromonas macacae
MKTQHFFEDFTSLYSLSKTIRFELKPIGKTLENIKKNGLIRRDEQRLDDYEKLKKVIDEYHEDFIANILSSFSFSEEILQSYIQNLSESEARAKIEKTMRDTLAKAFSEDERYKSIFKKELVKKDIPVWCPAYKSLCKKFDNFTTSLVPFHENRKNLYTSNEITASIPYRIVHVNLPKFIQNIEALCELQKKMGADLYLEMMENLRNVWPSFVKTPDDLCNLKTYNHLMVQSSISEYNRFVGGYSTEDGTKHQGINEWINIYRQRNKEMRLPGLVFLHKQILAKVDSSSFISDTLENDDQVFCVLRQFRKLFWNTVSSKEDDAASLKDLFCGLSGYDPEAIYVSDAHLATISKNIFDRWNYISDAIRRKTEVLMPRKKESVERYAEKISKQIKKRQSYSLAELDDLLAHYSEESLPAGFSLLSYFTSLGGQKYLVSDGEVILYEEGSNIWDEVLIAFRDLQVILDKDFTEKKLGKDEEAVSVIKKALDSALRLRKFFDLLSGTGAEIRRDSSFYALYTDRMDKLKGLLKMYDKVRNYLTKKPYSIEKFKLHFDNPSLLSGWDKNKELNNLSVIFRQNGYYYLGIMTPKGKNLFKTLPKLGAEEMFYEKMEYKQIAEPMLMLPKVFFPKKTKPAFAPDQSVVDIYNKKTFKTGQKGFNKKDLYRLIDFYKEALTVHEWKLFNFSFSPTEQYRNIGEFFDEVREQAYKVSMVNVPASYIDEAVENGKLYLFQIYNKDFSPYSKGIPNLHTLYWKALFSEQNQSRVYKLCGGGELFYRKASLHMQDTTVHPKGISIHKKNLNKKGETSLFNYDLVKDKRFTEDKFFFHVPISINYKNKKITNVNQMVRDYIAQNDDLQIIGIDRGERNLLYISRIDTRGNLLEQFSLNVIESDKGDLRTDYQKILGDREQERLRRRQEWKSIESIKDLKDGYMSQVVHKICNMVVEHKAIVVLENLNLSFMKGRKKVEKSVYEKFERMLVDKLNYLVVDKKNLSNEPGGLYAAYQLTNPLFSFEELHRYPQSGILFFVDPWNTSLTDPSTGFVNLLGRINYTNVGDARKFFDRFNAIRYDGKGNILFDLDLSRFDVRVETQRKLWTLTTFGSRIAKSKKSGKWMVERIENLSLCFLELFEQFNIGYRVEKDLKKAILSQDRKEFYVRLIYLFNLMMQIRNSDGEEDYILSPALNEKNLQFDSRLIEAKDLPVDADANGAYNVARKGLMVVQRIKRGDHESIHRIGRAQWLRYVQEGIVE

SEQ ID NO: 55 - protein, 1373 aa, Moraxella bovoculi
MLFQDFTHLYPLSKTVRFELKPIDRTLEHIHAKNFLSQDETMADMHQKVKVILDDYHRDFIADMMGEVKLTKLAEFYDVYLKFRKNPKDDELQKQLKDLQAVLRKEIVKPIGNGGKYKAGYDRLFGAKLFKDGKELGDLAKFVIAQEGESSPKLAHLAHFEKFSTYFTGFHDNRKNMYSDEDKHTAIAYRLIHENLPRFIDNLQILTTIKQKHSALYDQIINELTASGLDVSLASHLDGYHKLLTQEGITAYNTLLGGISGEAGSPKIQGINELINSHHNQHCHKSERIAKLRPLHKQILSDGMSVSFLPSKFADDSEMCQAVNEFYRHYADVFAKVQSLFDGFDDHQKDGIYVEHKNLNELSKQAFGDFALLGRVLDGYYVDVVNPEFNERFAKAKTDNAKAKLTKEKDKFIKGVHSLASLEQAIEHYTARHDDESVQAGKLGQYFKHGLAGVDNPIQKIHNNHSTIKGFLERERPAGERALPKIKSGKNPEMTQLRQLKELLDNALNVAHFAKLLTTKTTLDNQDGNFYGEFGVLYDELAKIPTLYNKVRDYLSQKPFSTEKYKLNFGNPTLLNGWDLNKEKDNFGVILQKDGCYYLALLDKAHKKVFDNAPNTGKSIYQKMIYKYLEVRKQFPKVFFSKEAIAINYHPSKELVEIKDKGRQRSDDERLKLYRFILECLKIHPKYDKKFEGAIGDIQLFKKDKKGREVPISEKDLFDKINGIFSSKPKLEMEDFFIGEFKRYNPSQDLVDQYNIYKKIDSNDNRKKENFYNNHPKFKKDLVRYYYESMCKHEEWEESFEFSKKLQDIGCYVDVNELFTEIETRRLNYKISFCNINADYIDELVEQGQLYLFQIYNKDFSPKAHGKPNLHTLYFKALFSEDNLADPIYKLNGEAQIFYRKASLDMNETTIHRAGEVLENKNPDNPKKRQFVYDIIKDKRYTQDKFMLHVPITMNFGVQGMTIKEFNKKVNQSIQQYDEVNVIGIDRGERHLLYLTVINSKGEILEQCSLNDITTASANGTQMTTPYHKILDKREIERLNARVGWGEIETIKELKSGYLSHVVHQISQLMLKYNAIVVLEDLNFGFKRGRFKVEKQIYQNFENALIKKLNHLVLKDKADDEIGSYKNALQLTNNFTDLKSIGKQTGFLFYVPAWNTSKIDPETGFVDLLKPRYENIAQSQAFFGKFDKICYNADKDYFEFHIDYAKFTDKAKNSRQIWTICSHGDKRYVYDKTANQNKGAAKGINVNDELKSLFARHHINEKQPNLVMDICQNNDKEFHKSLMYLLKTLLALRYSNASSDEDFILSPVANDEGVFFNSALADDTQPQNADANGAYHIALKGLWLLNELKNSDDLNKVKLAIDNQTWLNFAQNR

SEQ ID NO: 56 - protein, 1259 aa, Moraxella bovoculi
MGIHGVPAALFQDFTHLYPLSKTVRFELKPIGRTLEHIHAKNFLSQDETMADMYQKVKVILDDYHRDFIADMMGEVKLTKLAEFYDVYLKFRKNPKDDGLQKQLKDLQAVLRKESVKPIGSGGKYKTGYDRLFGAKLFKDGKELGDLAKFVIAQEGESSPKLAHLAHFEKFSTYFTGFHDNRKNMYSDEDKHTAIAYRLIHENLPRFIDNLQILTTIKQKHSALYDQIINELTASGLDVSLASHLDGYHKLLTQEGITAYNRIIGEVNGYTNKHNQICHKSERIAKLRPLHKQILSDGMGVSFLPSKFADDSEMCQAVNEFYRHYTDVFAKVQSLFDGFDDHQKDGIYVEHKNLNELSKQAFGDFALLGRVLDGYYVDVVNPEFNERFAKAKTDNAKAKLTKEKDKFIKGVHSLASLEQAIEHHTARHDDESVQAGKLGQYFKHGLAGVDNPIQKIHNNHSTIKGFLERERPAGERALPKIKSGKNPEMTQLRQLKELLDNALNVAHFAKLLTTKTTLDNQDGNFYGEFGVLYDELAKIPTLYNKVRDYLSQKPFSTEKYKLNFGNPTLLNGWDLNKEKDNFGVILQKDGCYYLALLDKAHKKVFDNAPNTGKNVYQKMVYKLLPGPNKMLPKVFFAKSNLDYYNPSAELLDKYAKGTHKKGDNFNLKDCHALIDFFKAGINKHPEWQHFGFKFSPTSSYRDLSDFYREVEPQGYQVKFVDINADYIDELVEQGKLYLFQIYNKDFSPKAHGKPNLHTLYFKALFSEDNLADPIYKLNGEAQIFYRKASLDMNETTIHRAGEVLENKNPDNPKKRQFVYDIIKDKRYTQDKFMLHVPITMNFGVQGMTIKEFNKKVNQSIQQYDEVNVIGIDRGERHLLYLTVINSKGEILEQRSLNDITTASANGTQVTTPYHKILDKREIERLNARVGWGEIETIKELKSGYLSHVVHQINQLMLKYNAIVVLEDLNFGFKRGRFKVEKQIYQNFENALIKKLNHLVLKDKADDEIGSYKNALQLTNNFTDLKSIGKQTGFLFYVPAWNTSKIDPETGFVDLLKPRYENIAQSQAFFGKFDKICYNTDKGYFEFHIDYAKFTDKAKNSRQKWAICSHGDKRYVYDKTANQNKGAAKGINVNDELKSLFARYHINDKQPNLVMDICQNNDKEFHKSLMCLLKTLLALRYSNASSDEDFILSPVANDEGVFFNSALADDTQPQNADANGAYHIALKGLWLLNELKNSDDLNKVKLAIDNQTWLNFAQNR

SEQ ID NO: 57 - protein, 1269 aa, Moraxella bovoculi
MGIHGVPAALFQDFTHLYPLSKTVRFELKPIGKTLEHIHAKNFLNQDETMADMYQKVKAILDDYHRDFIADMMGEVKLTKLAEFYDVYLKFRKNPKDDGLQKQLKDLQAVLRKEIVKPIGNGGKYKAGYDRLFGAKLFKDGKELGDLAKFVIAQEGESSPKLAHLAHFEKFSTYFTGFHDNRKNMYSDEDKHTAIAYRLIHENLPRFIDNLQILATIKQKHSALYDQIINELTASGLDVSLASHLDGYHKLLTQEGITAYNTLLGGISGEAGSRKIQGINELINSHHNQHCHKSERIAKLRPLHKQILSDGMGVSFLPSKFADDSEVCQAVNEFYRHYADVFAKVQSLFDGFDDYQKDGIYVEYKNLNELSKQAFGDFALLGRVLDGYYVDVVNPEFNERFAKAKTDNAKAKLTKEKDKFIKGVHSLASLEQAIEHYTARHDDESVQAGKLGQYFKHGLAGVDNPIQKIHNNHSTIKGFLERERPAGERALPKIKSDKSPEIRQLKELLDNALNVAHFAKLLTTKTTLHNQDGNFYGEFGALYDELAKIATLYNKVRDYLSQKPFSTEKYKLNFGNPTLLNGWDLNKEKDNFGVILQKDGCYYLALLDKAHKKVFDNAPNTGKSVYQKMIYKLLPGPNKMLPKVFFAKSNLDYYNPSAELLDKYAQGTHKKGDNFNLKDCHALIDFFKAGINKHPEWQHFGFKFSPTSSYQDLSDFYREVEPQGYQVKFVDINADYINELVEQGQLYLFQIYNKDFSPKAHGKPNLHTLYFKALFSEDNLVNPIYKLNGEAEIFYRKASLDMNETTIHRAGEVLENKNPDNPKKRQFVYDIIKDKRYTQDKFMLHVPITMNFGVQGMTIKEFNKKVNQSIQQYDEVNVIGIDRGERHLLYLTVINSKGEILEQRSLNDITTASANGTQMTTPYHKILDKREIERLNARVGWGEIETIKELKSGYLSHVVHQISQLMLKYNAIVVLEDLNFGFKRGRFKVEKQIYQNFENALIKKLNHLVLKDKADDEIGSYKNALQLTNNFTDLKSIGKQTGFLFYVPAWNTSKIDPETGFVDLLKPRYENIAQSQAFFGKFDKICYNADRGYFEFHIDYAKFNDKAKNSRQIWKICSHGDKRYVYDKTANQNKGATIGVNVNDELKSLFTRYHINDKQPNLVMDICQNNDKEFHKSLMYLLKTLLALRYSNASSDEDFILSPVANDEGVFFNSALADDTQPQNADANGAYHIALKGLWLLNELKNSDDLNKVKLAIDNQTWLNFAQNR

SEQ ID NO: 58 - protein, 1306 aa, Thiomicrospira sp.
MGIHGVPAATKTFDSEFFNLYSLQKTVRFELKPVGETASFVEDFKNEGLKRVVSEDERRAVDYQKVKEIIDDYHRDFIEESLNYFPEQVSKDALEQAFHLYQKLKAAKVEEREKALKEWEALQKKLREKVVKCFSDSNKARFSRIDKKELIKEDLINWLVAQNREDDIPTVETFNNFTTYFTGFHENRKNIYSKDDHATAISFRLIHENLPKFFDNVISFNKLKEGFPELKFDKVKEDLEVDYDLKHAFEIEYFVNFVTQAGIDQYNYLLGGKTLEDGTKKQGMNEQINLFKQQQTRDKARQIPKLIPLFKQILSERTESQSFIPKQFESDQELFDSLQKLHNNCQDKFTVLQQAILGLAEADLKKVFIKTSDLNALSNTIFGNYSVFSDALNLYKESLKTKKAQEAFEKLPAHSIHDLIQYLEQFNSSLDAEKQQSTDTVLNYFIKTDELYSRFIKSTSEAFTQVQPLFELEALSSKRRPPESEDEGAKGQEGFEQIKRIKAYLDTLMEAVHFAKPLYLVKGRKMIEGLDKDQSFYEAFEMAYQELESLIIPIYNKARSYLSRKPFKADKFKINFDNNTLLSGWDANKETANASILFKKDGLYYLGIMPKGKTFLFDYFVSSEDSEKLKQRRQKTAEEALAQDGESYFEKIRYKLLPGASKMLPKVFFSNKNIGFYNPSDDILRIRNTASHTKNGTPQKGHSKVEFNLNDCHKMIDFFKSSIQKHPEWGSFGFTFSDTSDFEDMSAFYREVENQGYVISFDKIKETYIQSQVEQGNLYLFQIYNKDFSPYSKGKPNLHTLYWKALFEEANLNNVVAKLNGEAEIFFRRHSIKASDKVVHPANQAIDNKNPHTEKTQSTFEYDLVKDKRYTQDKFFFHVPISLNFKAQGVSKFNDKVNGFLKGNPDVNIIGIDRGERHLLYFTVVNQKGEILVQESLNTLMSDKGHVNDYQQKLDKKEQERDAARKSWTTVENIKELKEGYLSHVVHKLAHLIIKYNAIVCLEDLNFGFKRGRFKVEKQVYQKFEKALIDKLNYLVFKEKELGEVGHYLTAYQLTAPFESFKKLGKQSGILFYVPADYTSKIDPTTGFVNFLDLRYQSVEKAKQLLSDFNAIRFNSVQNYFEFEIDYKKLTPKRKVGTQSKWVICTYGDVRYQNRRNQKGHWETEEVNVTEKLKALFASDSKTTTVIDYANDDNLIDVILEQDKASFFKELLWLLKLTMTLRHSKIKSEDDFILSPVKNEQGEFYDSRKAGEVWPKDADANGAYHIALKGLWNLQQINQWEKGKTLNLAIKNQDWFSFIQEKPYQE

SEQ ID NO: 59 - protein, 1214 aa, Butyrivibrio sp.
MGIHGVPAAYYQNLTKKYPVSKTIRNELIPIGKTLENIRKNNILESDVKRKQDYEHVKGIMDEYHKQLINEALDNYMLPSLNQAAEIYLKKHVDVEDREEFKKTQDLLRREVTGRLKEHENYTKIGKKDILDLLEKLPSISEEDYNALESFRNFYTYFTSYNKVRENLYSDEEKSSTVAYRLINENLPKFLDNIKSYAFVKAAGVLADCIEEEEQDALFMVETFNMTLTQEGIDMYNYQIGKVNSAINLYNQKNHKVEEFKKIPKMKVLYKQILSDREEVFIGEFKDDETLLSSIGAYGNVLMTYLKSEKINIFFDALRESEGKNVYVKNDLSKTTMSNIVFGSWSAFDELLNQEYDLANENKKKDDKYFEKRQKELKKNKSYTLEQMSNLSKEDISPIENYIERISEDIEKICIYNGEFEKIVVNEHDSSRKLSKNIKAVKVIKDYLDSIKELEHDIKLINGSGQELEKNLVVYVGQEEALEQLRPVDSLYNLTRNYLTKKPFSTEKVKLNFNKSTLLNGWDKNKETDNLGILFFKDGKYYLGIMNTTANKAFVNPPAAKTENVFKKVDYKLLPGSNKMLPKVFFAKSNIGYYNPSTELYSNYKKGTHKKGPSFSIDDCHNLIDFFKESIKKHEDWSKFGFEFSDTADYRDISEFYREVEKQGYKLTFTDIDESYINDLIEKNELYLFQIYNKDFSEYSKGKLNLHTLYFMMLFDQRNLDNVVYKLNGEAEVFYRPASIAENELVIHKAGEGIKNKNPNRAKVKETSTFSYDIVKDKRYSKYKFTLHIPITMNFGVDEVRRFNDVINNALRTDDNVNVIGIDRGERNLLYVVVINSEGKILEQISLNSIINKEYDIETNYHALLDEREDDRNKARKDWNTIENIKELKTGYLSQVVNVVAKLVLKYNAIICLEDLNFGFKRGRQKVEKQVYQKFEKMLIEKLNYLVIDKSREQVSPEKMGGALNALQLTSKFKSFAELGKQSGIIYYVPAYLTSKIDPTTGFVNLFYIKYENIEKAKQFFDGFDFIRFNKKDDMFEFSFDYKSFTQKACGIRSKWIVYTNGERIIKYPNPEKNNLFDEKVINVTDEIKGLFKQYRIPYENGEDIKEIIISKAEADFYKRLFRLLHQTLQMRNSTSDGTRDYIISPVKNDRGEFFCSEFSEGTMPKDADANGAYNIARKGLWVLEQIRQKDEGEKVNLSMTNAEWLKYAQLHLL

SEQ ID NO: 60 - protein, 1129 aa, Artificial Sequence; identical to SEQ ID NO: 41
  synthetic sequence

SEQ ID NO: 61 - RNA, 20 nt, Artificial Sequence
  synthetic sequence
aauuucuacuaaguguagau

SEQ ID NO: 62 - RNA, 19 nt, Artificial Sequence
  synthetic sequence
aauuucuacucuuguagau

SEQ ID NO: 63 - RNA, 19 nt, Artificial Sequence
  synthetic sequence
aauuucuacuguuguagau

SEQ ID NO: 64 - RNA, 19 nt, Artificial Sequence
  synthetic sequence
aauuucuacuauuguagau

SEQ ID NO: 65 - RNA, 20 nt, Artificial Sequence
  synthetic sequence
aauuucuacuguuuguagau

SEQ ID NO: 66 - RNA, 19 nt, Artificial Sequence
  synthetic sequence
aauuucuacuguuguagau

SEQ ID NO: 67 - RNA, 19 nt, Artificial Sequence
  synthetic sequence
aauuucuacuauuguagau

SEQ ID NO: 68 - RNA, 91 nt, Artificial Sequence
  synthetic sequence
gucuagaggacagaauuuuucaacgggugugccaauggccacuuuccagguggcaaagcccguugagcuucucaaaucugagaaguggcac

SEQ ID NO: 69 - protein, 986 aa, Artificial Sequence
  synthetic sequence
MEKRINKIRKKLSADNATKPVSRSGPMKTLLVRVMTDDLKKRLEKRRKKPEVMPQVISNNAANNLRMLLDDYTKMKEAILQVYWQEFKDDHVGLMCKFAQPASKKIDQNKLKPEMDEKGNLTTAGFACSQCGQPLFVYKLEQVSEKGKAYTNYFGRCNVAEHEKLILLAQLKPEKDSDEAVTYSLGKFGQRALDFYSIHVTKESTHPVKPLAQIAGNRYASGPVGKALSDACMGTIASFLSKYQDIIIEHQKVVKGNQKRLESLRELAGKENLEYPSVTLPPQPHTKEGVDAYNEVIARVRMWVNLNLWQKLKLSRDDAKPLLRLKGFPSFPVVERRENEVDWWNTINEVKKLIDAKRDMGRVFWSGVTAEKRNTILEGYNYLPNENDHKKREGSLENPKKPAKRQFGDLLLYLEKKYAGDWGKVFDEAWERIDKKIAGLTSHIEREEARNAEDAQSKAVLTDWLRAKASFVLERLKEMDEKEFYACEIQLQKWYGDLRGNPFAVEAENRVVDISGFSIGSDGHSIQYRNLLAWKYLENGKREFYLLMNYGKKGRIRFTDGTDIKKSGKWQGLLYGGGKAKVIDLTFDPDDEQLIILPLAFGTRQGREFIWNDLLSLETGLIKLANGRVIEKTIYNKKIGRDEPALFVALTFERREVVDPSNIKPVNLIGVDRGENIPAVIALTDPEGCPLPEFKDSSGGPTDILRIGEGYKEKQRAIQAAKEVEQRRAGGYSRKFASKSRNLADDMVRNSARDLFYHAVTHDAVLVFENLSRGFGRQGKRTFMTERQYTKMEDWLTAKLAYEGLTSKTYLSKTLAQYTSKTCSNCGFTITTADYDGMLVRLKKTSDGWATTLNNKELKAEGQITYYNRYKRQTVEKELSAELDRLSEESGNNDISKWTKGRRDEALFLLKKRFSHRPVQEQFVCLDCGHEVHADEQAALNIARSWLFLNSNSTEFKSYKSGKQPFVGAWQAFYKRRLKEVWKPNA

SEQ ID NO: 70 - protein, 978 aa, Artificial Sequence
  synthetic sequence
MQEIKRINKIRRRLVKDSNTKKAGKTGPMKTLLVRVMTPDLRERLENLRKKPENIPQPISNTSRANLNKLLTDYTEMKKAILHVYWEEFQKDPVGLMSRVAQPAPKNIDQRKLIPVKDGNERLTSSGFACSQCCQPLYVYKLEQVNDKGKPHTNYFGRCNVSEHERLILLSPHKPEANDELVTYSLGKFGQRALDFYSIHVTRESNHPVKPLEQIGGNSCASGPVGKALSDACMGAVASFLTKYQDIILEHQKVIKKNEKRLANLKDIASANGLAFPKITLPPQPHTKEGIEAYNNVVAQIVIWVNLNLWQKLKIGRDEAKPLQRLKGFPSFPLVERQANEVDWWDMVCNVKKLINEKKEDGKVFWQNLAGYKRQEALLPYLSSEEDRKKGKKFARYQFGDLLLHLEKKHGEDWGKVYDEAWERIDKKVEGLSKHIKLEEERRSEDAQSKAALTDWLRAKASFVIEGLKEADKDEFCRCELKLQKWYGDLRGKPFAIEAENSILDISGFSKQYNCAFIWQKDGVKKLNLYLIINYFKGGKLRFKKIKPEAFEANRFYTVINKKSGEIVPMEVNFNFDDPNLIILPLAFGKRQGREFIWNDLLSLETGSLKLANGRVIEKTLYNRRTRQDEPALFVALTFERREVLDSSNIKPMNLIGIDRGENIPAVIALTDPEGCPLSRFKDSLGNPTHILRIGESYKEKQRTIQAAKEVEQRRAGGYSRKYASKAKNLADDMVRNTARDLLYYAVTQDAMLIFENLSRGFGRQGKRTFMAERQYTRMEDWLTAKLAYEGLPSKTYLSKTLAQYTSKTCSNCGFTITSADYDRVLEKLKKTATGWMTTINGKELKVEGQITYYNRYKRQNVVKDLSVELDRLSEESVNNDISSWTKGRSGEALSLLKKRFSHRPVQEKFVCLNCGFETHADEQAALNIARSWLFLRSQEYKKYQTNKTTGNTDKRAFVETWQSFYRKKLKEVWKPAV

SEQ ID NO: 71 - DNA, 13 bp, Artificial Sequence
  synthetic sequence
cccacgttgacac

SEQ ID NO: 72 - DNA, 13 bp, Artificial Sequence
  synthetic sequence
aaatgaaagatag

SEQ ID NO: 73 - DNA, 13 bp, Artificial Sequence
  synthetic sequence
ggcttgaaaagat

SEQ ID NO: 74 - DNA, 13 bp, Artificial Sequence
  synthetic sequence
tttatcagaaggt

SEQ ID NO: 75 - DNA, 13 bp, Artificial Sequence
  synthetic sequence
gcatctcagttgt

SEQ ID NO: 76 - DNA, 13 bp, Artificial Sequence
  synthetic sequence
aaaaaccatttga

SEQ ID NO: 77 - DNA, 13 bp, Artificial Sequence
  synthetic sequence
gaagacataggct

SEQ ID NO: 78 - DNA, 13 bp, Artificial Sequence
  synthetic sequence
cttggatgagcaa

SEQ ID NO: 79 - DNA, 13 bp, Artificial Sequence
  synthetic sequence
acaacatcagatg

SEQ ID NO: 80 - DNA, 13 bp, Artificial Sequence
  synthetic sequence
gtgacagaaagaa

SEQ ID NO: 81 - DNA, 13 bp, Artificial Sequence
  synthetic sequence
ttcaccatgcaac

SEQ ID NO: 82 - DNA, 13 bp, Artificial Sequence
  synthetic sequence
gagaaaaatttcc

SEQ ID NO: 83 - DNA, 13 bp, Artificial Sequence
  synthetic sequence
gaagagggaatct

SEQ ID NO: 84 - DNA, 13 bp, Artificial Sequence
  synthetic sequence
aacattgcaagac

SEQ ID NO: 85 - DNA, 13 bp, Artificial Sequence
  synthetic sequence
acaccttatgaag

SEQ ID NO: 86 - DNA, 13 bp, Artificial Sequence
  synthetic sequence
taacttctcggct

SEQ ID NO: 87 - DNA, 13 bp, Artificial Sequence
  synthetic sequence
gcagtcaaaccta

SEQ ID NO: 88 - DNA, 13 bp, Artificial Sequence
  synthetic sequence
taggaaatgaact

SEQ ID NO: 89 - DNA, 13 bp, Artificial Sequence
  synthetic sequence
aactgtcacccca

SEQ ID NO: 90 - DNA, 13 bp, Artificial Sequence
  synthetic sequence
gatgcaagcacat

SEQ ID NO: 91 - DNA, 13 bp, Artificial Sequence
  synthetic sequence
ctgaatcatgcat

SEQ ID NO: 92 - DNA, 13 bp, Artificial Sequence
  synthetic sequence
atatgctttggga

SEQ ID NO: 93 - DNA, 13 bp, Artificial Sequence
  synthetic sequence
agtggggacatgg

SEQ ID NO: 94 - DNA, 13 bp, Artificial Sequence
  synthetic sequence
agcagcagtgtga

SEQ ID NO: 95 - DNA, 13 bp, Artificial Sequence
  synthetic sequence
caaggtcatttat

SEQ ID NO: 96 - DNA, 13 bp, Artificial Sequence
  synthetic sequence
ttgagccttcaaa

SEQ ID NO: 97 - DNA, 13 bp, Artificial Sequence
  synthetic sequence
aaacttgggtttt

SEQ ID NO: 98 - DNA, 13 bp, Artificial Sequence
  synthetic sequence
ctttctatttgaa

SEQ ID NO: 99 - DNA, 13 bp, Artificial Sequence
  synthetic sequence
agatgaacaggag

SEQ ID NO: 100 - DNA, 13 bp, Artificial Sequence
  synthetic sequence
taaaatatcccac

SEQ ID NO: 101 - DNA, 13 bp, Artificial Sequence
  synthetic sequence
agcatctctgaag

SEQ ID NO: 102 - DNA, 13 bp, Artificial Sequence
  synthetic sequence
cctgatgacacct

SEQ ID NO: 103 - DNA, 13 bp, Artificial Sequence
  synthetic sequence
aaccttcagttct

SEQ ID NO: 104 - DNA, 13 bp, Artificial Sequence
  synthetic sequence
actcacctacaga

SEQ ID NO: 105 - DNA, 13 bp, Artificial Sequence
  synthetic sequence
tgtttacagctgt

SEQ ID NO: 106 - DNA, 13 bp, Artificial Sequence
  synthetic sequence
accatctagatgt

SEQ ID NO: 107 - DNA, 13 bp, Artificial Sequence
  synthetic sequence
cacaacatcaaac

SEQ ID NO: 108 - DNA, 13 bp, Artificial Sequence
  synthetic sequence
ctatcgtgatagt

SEQ ID NO: 109 - DNA, 13 bp, Artificial Sequence
  synthetic sequence
ttgcaaactgcta

SEQ ID NO: 110 - DNA, 13 bp, Artificial Sequence
  synthetic sequence
gtgttcactttga

SEQ ID NO: 111 - DNA, 13 bp, Artificial Sequence
  synthetic sequence
gaaacaaggcagc

SEQ ID NO: 112 - DNA, 13 bp, Artificial Sequence
  synthetic sequence
tagtgatgccata

SEQ ID NO: 113 - DNA, 13 bp, Artificial Sequence
  synthetic sequence
aaacgagattctg

SEQ ID NO: 114 - DNA, 13 bp, Artificial Sequence
  synthetic sequence
ctatccttaatgt

SEQ ID NO: 115 - DNA, 13 bp, Artificial Sequence
  synthetic sequence
aactagaaagctt

SEQ ID NO: 116 - DNA, 13 bp, Artificial Sequence
  synthetic sequence
aatatgacctctg

SEQ ID NO: 117 - DNA, 13 bp, Artificial Sequence
  synthetic sequence
ggaacttcttaaa

SEQ ID NO: 118 - DNA, 13 bp, Artificial Sequence
  synthetic sequence
actaccgtgacag

SEQ ID NO: 119 - DNA, 13 bp, Artificial Sequence
  synthetic sequence
aaggtctaactga

SEQ ID NO: 120 - DNA, 13 bp, Artificial Sequence
  synthetic sequence
atggaagtggaga

SEQ ID NO: 121 - DNA, 13 bp, Artificial Sequence
  synthetic sequence
caacttaaatctt

SEQ ID NO: 122 - DNA, 13 bp, Artificial Sequence
  synthetic sequence
cacagctcttaat

SEQ ID NO: 123 - DNA, 13 bp, Artificial Sequence
  synthetic sequence
cttctcctcaacg

SEQ ID NO: 124 - DNA, 13 bp, Artificial Sequence
  synthetic sequence
tgcttgaccatct

SEQ ID NO: 125 - DNA, 13 bp, Artificial Sequence
  synthetic sequence
ctagaaggtcact

SEQ ID NO: 126 - DNA, 13 bp, Artificial Sequence
  synthetic sequence
ttcaaggtgcaaa

SEQ ID NO: 127 - DNA, 13 bp, Artificial Sequence
  synthetic sequence
tcagacttggaac

SEQ ID NO: 128 - DNA, 13 bp, Artificial Sequence
  synthetic sequence
acagagagctcta

SEQ ID NO: 129 - DNA, 13 bp, Artificial Sequence
  synthetic sequence
agcattagccctg

SEQ ID NO: 130 - DNA, 13 bp, Artificial Sequence
  synthetic sequence
tgaagaggtacat

SEQ ID NO: 131 - DNA, 13 bp, Artificial Sequence
  synthetic sequence
gggttagcatctc

SEQ ID NO: 132 - DNA, 13 bp, Artificial Sequence
  synthetic sequence
cataacatcaaac

SEQ ID NO: 133 - DNA, 13 bp, Artificial Sequence
  synthetic sequence
agtgaagtatgct

SEQ ID NO: 134 - DNA, 13 bp, Artificial Sequence
  synthetic sequence
gcaacatggagct

SEQ ID NO: 135 - DNA, 13 bp, Artificial Sequence
  synthetic sequence
tgcactctggaca

SEQ ID NO: 136 - DNA, 13 bp, Artificial Sequence
  synthetic sequence
gatatttgagccc

SEQ ID NO: 137 - DNA, 13 bp, Artificial Sequence
  synthetic sequence
cacatgaggttta

SEQ ID NO: 138 - DNA, 13 bp, Artificial Sequence
  synthetic sequence
ctgagtcatgtat

SEQ ID NO: 139 - DNA, 13 bp, Artificial Sequence
  synthetic sequence
ctttgtgtgcttt

SEQ ID NO: 140 - DNA, 13 bp, Artificial Sequence
  synthetic sequence
tcaacaatgtgct

SEQ ID NO: 141 - DNA, 13 bp, Artificial Sequence
  synthetic sequence
ggtctgtttgcaa

SEQ ID NO: 142 - DNA, 13 bp, Artificial Sequence
  synthetic sequence
tcttcaacaagct

SEQ ID NO: 143 - DNA, 13 bp, Artificial Sequence
  synthetic sequence
actctgttctgac

SEQ ID NO: 144 - DNA, 13 bp, Artificial Sequence
  synthetic sequence
agtgacagaaagg

SEQ ID NO: 145 - DNA, 13 bp, Artificial Sequence
  synthetic sequence
agaagtaaggtca

SEQ ID NO: 146 - DNA, 13 bp, Artificial Sequence
  synthetic sequence
ctctctgatactg

SEQ ID NO: 147 - DNA, 13 bp, Artificial Sequence
  synthetic sequence
tcactctgatcaa

SEQ ID NO: 148 - DNA, 13 bp, Artificial Sequence
  synthetic sequence
aagacagtagcag

SEQ ID NO: 149 - DNA, 13 bp, Artificial Sequence
  synthetic sequence
tacggactacaag

SEQ ID NO: 150 - DNA, 13 bp, Artificial Sequence
  synthetic sequence
taagttaacattc

SEQ ID NO: 151 - DNA, 13 bp, Artificial Sequence
  synthetic sequence
gaagacatttcac

SEQ ID NO: 152 - DNA, 13 bp, Artificial Sequence
  synthetic sequence
tcttcagtgttaa

SEQ ID NO: 153 - DNA, 13 bp, Artificial Sequence
  synthetic sequence
attatggaaacag

SEQ ID NO: 154 - DNA, 13 bp, Artificial Sequence
  synthetic sequence
tgtcaggcatcga

SEQ ID NO: 155 - DNA, 13 bp, Artificial Sequence
  synthetic sequence
ctgaatcatgctc

SEQ ID NO: 156 - DNA, 13 bp, Artificial Sequence
  synthetic sequence
acctgcagacatc

SEQ ID NO: 157 - DNA, 13 bp, Artificial Sequence
  synthetic sequence
atgttgaagattt

SEQ ID NO: 158 - DNA, 13 bp, Artificial Sequence
  synthetic sequence
aacaaactctcta

SEQ ID NO: 159 - DNA, 13 bp, Artificial Sequence
  synthetic sequence
tcccttcagtgtt

SEQ ID NO: 160 - DNA, 13 bp, Artificial Sequence
  synthetic sequence
gggtttgtttgcc

SEQ ID NO: 161 - DNA, 13 bp, Artificial Sequence
  synthetic sequence
aggtgcagagcca

SEQ ID NO: 162 - DNA, 13 bp, Artificial Sequence
  synthetic sequence
aaccatttgaatt

SEQ ID NO: 163 - DNA, 13 bp, Artificial Sequence
  synthetic sequence
agagatgctgtca

SEQ ID NO: 164 - DNA, 13 bp, Artificial Sequence
  synthetic sequence
tgatatttagcga

SEQ ID NO: 165 - DNA, 13 bp, Artificial Sequence
  synthetic sequence
tgaactgagttct

SEQ ID NO: 166 - DNA, 13 bp, Artificial Sequence
  synthetic sequence
agttaacttctcg

SEQ ID NO: 167 - DNA, 13 bp, Artificial Sequence
  synthetic sequence
gttatctaaactg

SEQ ID NO: 168 - DNA, 13 bp, Artificial Sequence
  synthetic sequence
caatatactgctc

SEQ ID NO: 169 - DNA, 13 bp, Artificial Sequence
  synthetic sequence
tgaagcagcagca

SEQ ID NO: 170 - DNA, 13 bp, Artificial Sequence
  synthetic sequence
gaatgagcttttg

SEQ ID NO: 171 - DNA, 13 bp, Artificial Sequence
  synthetic sequence
ggaaatttagagt

SEQ ID NO: 172 - DNA, 13 bp, Artificial Sequence
  synthetic sequence
agctttagtagtg

SEQ ID NO: 173 - DNA, 13 bp, Artificial Sequence
  synthetic sequence
tgatgccgaaagt

SEQ ID NO: 174 - DNA, 13 bp, Artificial Sequence
  synthetic sequence
atcttcagttctc

SEQ ID NO: 175 - DNA, 13 bp, Artificial Sequence
  synthetic sequence
aaatatcctacag

SEQ ID NO: 176 - DNA, 13 bp, Artificial Sequence
  synthetic sequence
tgcgaaaactgtc

SEQ ID NO: 177 - DNA, 13 bp, Artificial Sequence
  synthetic sequence
agagacaagtact

SEQ ID NO: 178 - DNA, 13 bp, Artificial Sequence
  synthetic sequence
gccagccactgta

SEQ ID NO: 179 - DNA, 13 bp, Artificial Sequence
  synthetic sequence
ttcttcccttctg

SEQ ID NO: 180 - DNA, 13 bp, Artificial Sequence
  synthetic sequence
caacttcagacga

SEQ ID NO: 181 - DNA, 13 bp, Artificial Sequence
  synthetic sequence
gctaggaggtcat

SEQ ID NO: 182 - DNA, 13 bp, Artificial Sequence
  synthetic sequence
ttgcgattggcta

SEQ ID NO: 183 - DNA, 13 bp, Artificial Sequence
  synthetic sequence
ctgtttgacctga

SEQ ID NO: 184 - DNA, 13 bp, Artificial Sequence
  synthetic sequence
agcagtcaaaccc

SEQ ID NO: 185 - DNA, 13 bp, Artificial Sequence
  synthetic sequence
tgaaccctcaaag

SEQ ID NO: 186 - DNA, 13 bp, Artificial Sequence
  synthetic sequence
cccagtgatgcca

SEQ ID NO: 187 - DNA, 13 bp, Artificial Sequence
  synthetic sequence
tgacaggcaggtc

SEQ ID NO: 188 - DNA, 13 bp, Artificial Sequence
  synthetic sequence
gatcactcatatc

SEQ ID NO: 189 - DNA, 13 bp, Artificial Sequence
  synthetic sequence
cagtacgtaagtg

SEQ ID NO: 190 - DNA, 13 bp, Artificial Sequence
  synthetic sequence
agagttgcacaca

SEQ ID NO: 191 - DNA, 13 bp, Artificial Sequence
  synthetic sequence
actgcaaacatag

SEQ ID NO: 192 - DNA, 13 bp, Artificial Sequence
  synthetic sequence
aacattgaaactg

SEQ ID NO: 193 - DNA, 13 bp, Artificial Sequence
  synthetic sequence
actgcatatcaag

SEQ ID NO: 194 - DNA, 13 bp, Artificial Sequence
  synthetic sequence
ggtgtaagagaaa

SEQ ID NO: 195 - DNA, 13 bp, Artificial Sequence
  synthetic sequence
tctgccaaatgtt

SEQ ID NO: 196 - DNA, 13 bp, Artificial Sequence
  synthetic sequence
atgaaccagatga

SEQ ID NO: 197 - DNA, 13 bp, Artificial Sequence
  synthetic sequence
gacacctcaaaga

SEQ ID NO: 198 - DNA, 13 bp, Artificial Sequence
  synthetic sequence
gtgaggcttcctc

SEQ ID NO: 199 - DNA, 13 bp, Artificial Sequence
  synthetic sequence
ataattggaaagc

SEQ ID NO: 200 - DNA, 13 bp, Artificial Sequence
  synthetic sequence
catatcagaccag

SEQ ID NO: 201 - DNA, 13 bp, Artificial Sequence
  synthetic sequence
ggcatgtgacaca

SEQ ID NO: 202 - DNA, 13 bp, Artificial Sequence
  synthetic sequence
agagaaattcacc

SEQ ID NO: 203 - DNA, 13 bp, Artificial Sequence
  synthetic sequence
gggccacgtaaaa

SEQ ID NO: 204 - DNA, 13 bp, Artificial Sequence
  synthetic sequence
ctcttctggttca

SEQ ID NO: 205 - DNA, 13 bp, Artificial Sequence
  synthetic sequence
tggaaggttgaat

SEQ ID NO: 206 - DNA, 13 bp, Artificial Sequence
  synthetic sequence
acctgacaaattt

SEQ ID NO: 207 - DNA, 13 bp, Artificial Sequence
  synthetic sequence
agtacttatcagg

SEQ ID NO: 208 - DNA, 13 bp, Artificial Sequence
  synthetic sequence
cctcagcacagcc

SEQ ID NO: 209 - DNA, 13 bp, Artificial Sequence
  synthetic sequence
aggggccatgtga

SEQ ID NO: 210 - DNA, 13 bp, Artificial Sequence
  synthetic sequence
agtccatccagca

SEQ ID NO: 211 - DNA, 13 bp, Artificial Sequence
  synthetic sequence
ttcatgtagatga

SEQ ID NO: 212 - DNA, 13 bp, Artificial Sequence
  synthetic sequence
gaagacctaacaa

SEQ ID NO: 213 - DNA, 13 bp, Artificial Sequence
  synthetic sequence
tgcacttgagcat

SEQ ID NO: 214 - DNA, 13 bp, Artificial Sequence
  synthetic sequence
gaagaatggccca

SEQ ID NO: 215 - DNA, 13 bp, Artificial Sequence
  synthetic sequence
gcatcaagattga

SEQ ID NO: 216 - DNA, 13 bp, Artificial Sequence
  synthetic sequence
tcttttggttcag

SEQ ID NO: 217 - DNA, 13 bp, Artificial Sequence
  synthetic sequence
cagaggccatagt

SEQ ID NO: 218 - DNA, 13 bp, Artificial Sequence
  synthetic sequence
taatcggaaagca

SEQ ID NO: 219 - DNA, 13 bp, Artificial Sequence
  synthetic sequence
tggattgtgcttc

SEQ ID NO: 220 - DNA, 13 bp, Artificial Sequence
  synthetic sequence
tgcaagagaaatc

SEQ ID NO: 221 - DNA, 13 bp, Artificial Sequence
  synthetic sequence
aagccacccgcga

SEQ ID NO: 222 - DNA, 13 bp, Artificial Sequence
  synthetic sequence
acaagtagaagag

SEQ ID NO: 223 - DNA, 13 bp, Artificial Sequence
  synthetic sequence
catctcaaagacg

SEQ ID NO: 224 - DNA, 13 bp, Artificial Sequence
  synthetic sequence
ctgtcacaccgga

SEQ ID NO: 225 - DNA, 13 bp, Artificial Sequence
  synthetic sequence
agcacagccccac

SEQ ID NO: 226 - DNA, 13 bp, Artificial Sequence
  synthetic sequence
tattgaggacaga

SEQ ID NO: 227 - DNA, 13 bp, Artificial Sequence
  synthetic sequence
caagtatttgcct

SEQ ID NO: 228 - DNA, 13 bp, Artificial Sequence
  synthetic sequence
aacatctaattca

SEQ ID NO: 229 - DNA, 13 bp, Artificial Sequence
  synthetic sequence
gtctgcccagcag

SEQ ID NO: 230 - DNA, 13 bp, Artificial Sequence
  synthetic sequence
cacaacaccaccg

SEQ ID NO: 231 - DNA, 13 bp, Artificial Sequence
  synthetic sequence
ttgagactgatta

SEQ ID NO: 232 - DNA, 13 bp, Artificial Sequence
  synthetic sequence
tttaaaccaacag

SEQ ID NO: 233 - DNA, 13 bp, Artificial Sequence
  synthetic sequence
agacactgacgga

SEQ ID NO: 234 - DNA, 13 bp, Artificial Sequence
  synthetic sequence
tttctcttttggt

SEQ ID NO: 235 - DNA, 13 bp, Artificial Sequence
  synthetic sequence
tcccaccaacgtc

SEQ ID NO: 236 - DNA, 13 bp, Artificial Sequence
  synthetic sequence
ggggcgattaggc

SEQ ID NO: 237 - DNA, 13 bp, Artificial Sequence
  synthetic sequence
gactctgaaggct

SEQ ID NO: 238 - DNA, 13 bp, Artificial Sequence
  synthetic sequence
caatgactgcgtt

SEQ ID NO: 239 - DNA, 13 bp, Artificial Sequence
  synthetic sequence
aattgagcataag

SEQ ID NO: 240 - DNA, 13 bp, Artificial Sequence
  synthetic sequence
gcacgtcagtcac

SEQ ID NO: 241 - DNA, 13 bp, Artificial Sequence
  synthetic sequence
catcgaaactgat

SEQ ID NO: 242 - DNA, 13 bp, Artificial Sequence
  synthetic sequence
agctgtatgatct

SEQ ID NO: 243 - DNA, 13 bp, Artificial Sequence
  synthetic sequence
gctgcacacatgg

SEQ ID NO: 244 - DNA, 13 bp, Artificial Sequence
  synthetic sequence
gaagaagacctta

SEQ ID NO: 245 - DNA, 13 bp, Artificial Sequence
  synthetic sequence
tggaaagtggaat

SEQ ID NO: 246 - DNA, 13 bp, Artificial Sequence
  synthetic sequence
acttaaggatgaa

SEQ ID NO: 247 - DNA, 13 bp, Artificial Sequence
  synthetic sequence
ctggttcagtttt

SEQ ID NO: 248 - DNA, 13 bp, Artificial Sequence
  synthetic sequence
caggtgagagaaa

SEQ ID NO: 249 - DNA, 13 bp, Artificial Sequence
  synthetic sequence
ctagtgatgaagt

SEQ ID NO: 250 - DNA, 13 bp, Artificial Sequence
  synthetic sequence
cccaggcgatttg

SEQ ID NO: 251 - DNA, 13 bp, Artificial Sequence
  synthetic sequence
cagtacaacccaa

SEQ ID NO: 252 - DNA, 13 bp, Artificial Sequence
  synthetic sequence
tacttctctgcca

SEQ ID NO: 253 - DNA, 13 bp, Artificial Sequence
  synthetic sequence
aatgcatttgaat

SEQ ID NO: 254 - DNA, 13 bp, Artificial Sequence
  synthetic sequence
gttacccaagagc

SEQ ID NO: 255 - DNA, 13 bp, Artificial Sequence
  synthetic sequence
attcaagtacaga

SEQ ID NO: 256 - DNA, 13 bp, Artificial Sequence
  synthetic sequence
gaccatcaacaga

SEQ ID NO: 257 - DNA, 13 bp, Artificial Sequence
  synthetic sequence
tcaggtgacagac

SEQ ID NO: 258 - DNA, 13 bp, Artificial Sequence
  synthetic sequence
ttcagatggacta

SEQ ID NO: 259 - DNA, 13 bp, Artificial Sequence
  synthetic sequence
taacctcagatgg

SEQ ID NO: 260 - DNA, 13 bp, Artificial Sequence
  synthetic sequence
aacagtccgcaca

SEQ ID NO: 261 - DNA, 13 bp, Artificial Sequence
  synthetic sequence
ctccacaccaaca

SEQ ID NO: 262 - DNA, 13 bp, Artificial Sequence
  synthetic sequence
ccctcacaccgga

SEQ ID NO: 263 - DNA, 13 bp, Artificial Sequence
  synthetic sequence
actctttagacat

SEQ ID NO: 264 - DNA, 13 bp, Artificial Sequence
  synthetic sequence
acaacccgagccc

SEQ ID NO: 265 - DNA, 13 bp, Artificial Sequence
  synthetic sequence
aattgagacatac

SEQ ID NO: 266 - DNA, 13 bp, Artificial Sequence
  synthetic sequence
ccctagtgttagt

SEQ ID NO: 267 - DNA, 13 bp, Artificial Sequence
  synthetic sequence
acgcccacagtgt

SEQ ID NO: 268 - DNA, 13 bp, Artificial Sequence
  synthetic sequence
accaagtccattc

SEQ ID NO: 269 - DNA, 13 bp, Artificial Sequence
  synthetic sequence
caacaggccttgc

SEQ ID NO: 270 - DNA, 13 bp, Artificial Sequence
  synthetic sequence
tctcacagttcct

SEQ ID NO: 271 - DNA, 13 bp, Artificial Sequence
  synthetic sequence
ctggcgaaattgt

SEQ ID NO: 272 - DNA, 13 bp, Artificial Sequence
  synthetic sequence
atatacgagtgtg

SEQ ID NO: 273 - DNA, 13 bp, Artificial Sequence
  synthetic sequence
acccatatatgaa

SEQ ID NO: 274 - DNA, 13 bp, Artificial Sequence
  synthetic sequence
caaaatggaaaac

SEQ ID NO: 275 - DNA, 13 bp, Artificial Sequence
  synthetic sequence
aaagtccctggtg

SEQ ID NO: 276 - DNA, 13 bp, Artificial Sequence
  synthetic sequence
cgtgccgcttacg

SEQ ID NO: 277 - DNA, 13 bp, Artificial Sequence
  synthetic sequence
gactgtctcacag

SEQ ID NO: 278 - DNA, 13 bp, Artificial Sequence
  synthetic sequence
atcgaagtgacta

SEQ ID NO: 279 - DNA, 13 bp, Artificial Sequence
  synthetic sequence
agatgaacaaatg

SEQ ID NO: 280 - DNA, 13 bp, Artificial Sequence
  synthetic sequence
ccaagcttgcaga

SEQ ID NO: 281 - DNA, 13 bp, Artificial Sequence
  synthetic sequence
acaaggctggcgt

SEQ ID NO: 282 - DNA, 13 bp, Artificial Sequence
  synthetic sequence
tgatgatgctgct

SEQ ID NO: 283 - DNA, 13 bp, Artificial Sequence
  synthetic sequence
ggtccttgcagaa

SEQ ID NO: 284 - DNA, 13 bp, Artificial Sequence
  synthetic sequence
ggcatgtttccag

SEQ ID NO: 285 - DNA, 13 bp, Artificial Sequence
  synthetic sequence
aaaagagacagtt

SEQ ID NO: 286 - DNA, 13 bp, Artificial Sequence
  synthetic sequence
caacatcagtgtt

SEQ ID NO: 287 - DNA, 13 bp, Artificial Sequence
  synthetic sequence
tctgctgtttctt

SEQ ID NO: 288 - DNA, 13 bp, Artificial Sequence
  synthetic sequence
tttgctatcattt

SEQ ID NO: 289 - DNA, 13 bp, Artificial Sequence
  synthetic sequence
gaccaacagctga

SEQ ID NO: 290 - DNA, 13 bp, Artificial Sequence
  synthetic sequence
ttctactgaacat

SEQ ID NO: 291 - DNA, 13 bp, Artificial Sequence
  synthetic sequence
actttgagatgac

SEQ ID NO: 292 - DNA, 13 bp, Artificial Sequence
  synthetic sequence
aacaccaatctgg

SEQ ID NO: 293 - DNA, 13 bp, Artificial Sequence
  synthetic sequence
taatccaccatct

SEQ ID NO: 294 - DNA, 13 bp, Artificial Sequence
  synthetic sequence
ccacttcatcact

SEQ ID NO: 295 - DNA, 13 bp, Artificial Sequence
  synthetic sequence
ttgccttgtctat

SEQ ID NO: 296 - DNA, 13 bp, Artificial Sequence
  synthetic sequence
ctgccattctgct

SEQ ID NO: 297 - DNA, 13 bp, Artificial Sequence
  synthetic sequence
ctcttgcttgagc

SEQ ID NO: 298 - DNA, 13 bp, Artificial Sequence
  synthetic sequence
catcaatggagat

SEQ ID NO: 299 - DNA, 13 bp, Artificial Sequence
  synthetic sequence
aacttgtcctact

SEQ ID NO: 300 - DNA, 13 bp, Artificial Sequence
  synthetic sequence
tgtctttgaagaa

SEQ ID NO: 301 - DNA, 13 bp, Artificial Sequence
  synthetic sequence
tgacaagctcagc

SEQ ID NO: 302 - DNA, 13 bp, Artificial Sequence
  synthetic sequence
tgtacaccttctt

SEQ ID NO: 303 - DNA, 13 bp, Artificial Sequence
  synthetic sequence
agatggatgtgca

SEQ ID NO: 304 - DNA, 13 bp, Artificial Sequence
  synthetic sequence
cagctgccacttc

SEQ ID NO: 305 - DNA, 13 bp, Artificial Sequence
  synthetic sequence
ttgactcttctct

SEQ ID NO: 306 - DNA, 13 bp, Artificial Sequence
  synthetic sequence
gcaagtatattag

SEQ ID NO: 307 - DNA, 13 bp, Artificial Sequence
  synthetic sequence
actgctctaactg

SEQ ID NO: 308 - DNA, 13 bp, Artificial Sequence
  synthetic sequence
agtcctttgcgca

SEQ ID NO: 309 - DNA, 13 bp, Artificial Sequence
  synthetic sequence
tttattaagacct

SEQ ID NO: 310 - DNA, 13 bp, Artificial Sequence
  synthetic sequence
caatcttgcctgc

SEQ ID NO: 311 - DNA, 13 bp, Artificial Sequence
  synthetic sequence
aaataatgaaact

SEQ ID NO: 312 - DNA, 13 bp, Artificial Sequence
  synthetic sequence
tgctgagtagatc

SEQ ID NO: 313 - DNA, 13 bp, Artificial Sequence
  synthetic sequence
ttacactggttga

SEQ ID NO: 314 - DNA, 13 bp, Artificial Sequence
  synthetic sequence
acagaacactttg

SEQ ID NO: 315 - DNA, 13 bp, Artificial Sequence
  synthetic sequence
acatgtccttgag

SEQ ID NO: 316 - DNA, 13 bp, Artificial Sequence
  synthetic sequence
gtttgtctcgtgt

SEQ ID NO: 317 - DNA, 13 bp, Artificial Sequence
  synthetic sequence
ttatataggttgt

SEQ ID NO: 318 - DNA, 13 bp, Artificial Sequence
  synthetic sequence
tattggtgacaag

SEQ ID NO: 319 - DNA, 13 bp, Artificial Sequence
  synthetic sequence
tgtaagattcttc

SEQ ID NO: 320 - DNA, 13 bp, Artificial Sequence
  synthetic sequence
aaacagtggagca

SEQ ID NO: 321 - DNA, 13 bp, Artificial Sequence
  synthetic sequence
caactattcctct

SEQ ID NO: 322 - DNA, 13 bp, Artificial Sequence
  synthetic sequence
ttcgatacaaaca

SEQ ID NO: 323 - DNA, 13 bp, Artificial Sequence
  synthetic sequence
tttgagaagtcaa

SEQ ID NO: 324 - DNA, 13 bp, Artificial Sequence
  synthetic sequence
ctctctcctcagc

SEQ ID NO: 325 - DNA, 13 bp, Artificial Sequence
  synthetic sequence
tcatccaagcttg

SEQ ID NO: 326 - DNA, 13 bp, Artificial Sequence
  synthetic sequence
cctagctcattag

SEQ ID NO: 327 - DNA, 13 bp, Artificial Sequence
  synthetic sequence
aaataatcaaact

SEQ ID NO: 328 - DNA, 13 bp, Artificial Sequence
  synthetic sequence
atacaacataaca

SEQ ID NO: 329 - DNA, 13 bp, Artificial Sequence
  synthetic sequence
aagcagctcaatc

SEQ ID NO: 330 - DNA, 13 bp, Artificial Sequence
  synthetic sequence
acattgaaagaca

SEQ ID NO: 331 - DNA, 13 bp, Artificial Sequence
  synthetic sequence
ggcatgcttccaa

SEQ ID NO: 332 - DNA, 13 bp, Artificial Sequence
  synthetic sequence
aagcggtctttaa

SEQ ID NO: 333 - DNA, 13 bp, Artificial Sequence
  synthetic sequence
caatcttttctga

SEQ ID NO: 334 - DNA, 13 bp, Artificial Sequence
  synthetic sequence
aaacaatggagca

SEQ ID NO: 335 - DNA, 13 bp, Artificial Sequence
  synthetic sequence
gcttccaggctgt

SEQ ID NO: 336 - DNA, 13 bp, Artificial Sequence
  synthetic sequence
cttgtttcttaga

SEQ ID NO: 337 - DNA, 13 bp, Artificial Sequence
  synthetic sequence
tcatctttttgat

SEQ ID NO: 338 - DNA, 13 bp, Artificial Sequence
  synthetic sequence
attcttctacaac

SEQ ID NO: 339 - DNA, 13 bp, Artificial Sequence
  synthetic sequence
gacatgtctttga

SEQ ID NO: 340 - DNA, 13 bp, Artificial Sequence
  synthetic sequence
ggttgtgtgcata

SEQ ID NO: 341 - DNA, 13 bp, Artificial Sequence
  synthetic sequence
tttgtttgatggc

SEQ ID NO: 342 - DNA, 13 bp, Artificial Sequence
  synthetic sequence
ccttagtgaagct

SEQ ID NO: 343 - DNA, 13 bp, Artificial Sequence
  synthetic sequence
catctaccgtgct

SEQ ID NO: 344 - DNA, 13 bp, Artificial Sequence
  synthetic sequence
tttacgcattgcc

SEQ ID NO: 345 - DNA, 13 bp, Artificial Sequence
  synthetic sequence
gaaagaagaatgg

SEQ ID NO: 346 - DNA, 13 bp, Artificial Sequence
  synthetic sequence
ctgagcagacagt

SEQ ID NO: 347 - DNA, 13 bp, Artificial Sequence
  synthetic sequence
actgccttgcact

SEQ ID NO: 348 - DNA, 13 bp, Artificial Sequence
  synthetic sequence
gtgagttctttga

SEQ ID NO: 349 - DNA, 13 bp, Artificial Sequence
  synthetic sequence
tcatcaattttat

SEQ ID NO: 350 - DNA, 13 bp, Artificial Sequence
  synthetic sequence
acactattataca

SEQ ID NO: 351 - DNA, 13 bp, Artificial Sequence
  synthetic sequence
ctctctcctcagt

SEQ ID NO: 352 - DNA, 13 bp, Artificial Sequence
  synthetic sequence
tttgaaaggttct

SEQ ID NO: 353 - DNA, 13 bp, Artificial Sequence
  synthetic sequence
agatctgcacatt

SEQ ID NO: 354 - DNA, 13 bp, Artificial Sequence
  synthetic sequence
attcttctgcaac

SEQ ID NO: 355 - DNA, 13 bp, Artificial Sequence
  synthetic sequence
ccataagcccttt

SEQ ID NO: 356 - DNA, 13 bp, Artificial Sequence
  synthetic sequence
gctgccacttcct

SEQ ID NO: 357 - DNA, 13 bp, Artificial Sequence
  synthetic sequence
gcatcataccgga

SEQ ID NO: 358 - DNA, 13 bp, Artificial Sequence
  synthetic sequence
ccatcaaactcac

SEQ ID NO: 359 - DNA, 13 bp, Artificial Sequence
  synthetic sequence
tgtgcctatcaag

SEQ ID NO: 360 - DNA, 13 bp, Artificial Sequence
  synthetic sequence
taaaaccaaatct

SEQ ID NO: 361 - DNA, 13 bp, Artificial Sequence
  synthetic sequence
ctgacaagttcag

SEQ ID NO: 362 - DNA, 13 bp, Artificial Sequence
  synthetic sequence
tcaactattcccc

SEQ ID NO: 363 - DNA, 13 bp, Artificial Sequence
  synthetic sequence
tatctcgtgttag

SEQ ID NO: 364 - DNA, 13 bp, Artificial Sequence
  synthetic sequence
tatctgttaatga

SEQ ID NO: 365 - DNA, 13 bp, Artificial Sequence
  synthetic sequence
taccttcaagagc

SEQ ID NO: 366 - DNA, 13 bp, Artificial Sequence
  synthetic sequence
catggtataaatt

SEQ ID NO: 367 - DNA, 13 bp, Artificial Sequence
  synthetic sequence
tttactcattcca

SEQ ID NO: 368 - DNA, 13 bp, Artificial Sequence
  synthetic sequence
ttccattctagaa

SEQ ID NO: 369 - DNA, 13 bp, Artificial Sequence
  synthetic sequence
tctaccaaatata

SEQ ID NO: 370 - DNA, 13 bp, Artificial Sequence
  synthetic sequence
atttgcaatcatc

SEQ ID NO: 371 - DNA, 13 bp, Artificial Sequence
  synthetic sequence
agatcagttgaag

SEQ ID NO: 372 - DNA, 13 bp, Artificial Sequence
  synthetic sequence
taacattcaagga

SEQ ID NO: 373 - DNA, 13 bp, Artificial Sequence
  synthetic sequence
atgagtcctttgc

SEQ ID NO: 374 - DNA, 13 bp, Artificial Sequence
  synthetic sequence
cttgctcatgccg

SEQ ID NO: 375 - DNA, 13 bp, Artificial Sequence
  synthetic sequence
tctgcttgtcccg

SEQ ID NO: 376 - DNA, 13 bp, Artificial Sequence
  synthetic sequence
taaaacggacatg

SEQ ID NO: 377 - DNA, 13 bp, Artificial Sequence
  synthetic sequence
tccaatgtggtca

SEQ ID NO: 378 - DNA, 13 bp, Artificial Sequence
  synthetic sequence
tcattttcaaaga

SEQ ID NO: 379 - DNA, 13 bp, Artificial Sequence
  synthetic sequence
agtatggtgcaaa

SEQ ID NO: 380 - DNA, 13 bp, Artificial Sequence
  synthetic sequence
tgcagctaaaact

SEQ ID NO: 381 - DNA, 13 bp, Artificial Sequence
  synthetic sequence
tccatcaaattca

SEQ ID NO: 382 - DNA, 13 bp, Artificial Sequence
  synthetic sequence
cagctgagtggca

SEQ ID NO: 383 - DNA, 13 bp, Artificial Sequence
  synthetic sequence
aggcaatggactc

SEQ ID NO: 384 - DNA, 13 bp, Artificial Sequence
  synthetic sequence
catgactttagtc

SEQ ID NO: 385 - DNA, 13 bp, Artificial Sequence
  synthetic sequence
tctgcaagcgtgt

SEQ ID NO: 386 - DNA, 13 bp, Artificial Sequence
  synthetic sequence
ttttgatcttcac

SEQ ID NO: 387 - DNA, 13 bp, Artificial Sequence
  synthetic sequence
gctctctccttaa

SEQ ID NO: 388 - DNA, 13 bp, Artificial Sequence
  synthetic sequence
acagaacacttag

SEQ ID NO: 389 - DNA, 13 bp, Artificial Sequence
  synthetic sequence
caccatcgccaaa

SEQ ID NO: 390 - DNA, 13 bp, Artificial Sequence
  synthetic sequence
acctcatctagac

SEQ ID NO: 391 - DNA, 13 bp, Artificial Sequence
  synthetic sequence
atgcagtcagcct

SEQ ID NO: 392 - DNA, 13 bp, Artificial Sequence
  synthetic sequence
gattctgcttttg

SEQ ID NO: 393 - DNA, 13 bp, Artificial Sequence
  synthetic sequence
ccacagtactaag

SEQ ID NO: 394 - DNA, 13 bp, Artificial Sequence
  synthetic sequence
taatctttgaaag

SEQ ID NO: 395 - DNA, 13 bp, Artificial Sequence
  synthetic sequence
caagagggacact

SEQ ID NO: 396 - DNA, 13 bp, Artificial Sequence
  synthetic sequence
caactgactcaga

SEQ ID NO: 397 - DNA, 13 bp, Artificial Sequence
  synthetic sequence
tgctgtttcatca

SEQ ID NO: 398 - DNA, 13 bp, Artificial Sequence
  synthetic sequence
taacatattctct

SEQ ID NO: 399 - DNA, 13 bp, Artificial Sequence
  synthetic sequence
agctgtttagtgc

SEQ ID NO: 400 - DNA, 13 bp, Artificial Sequence
  synthetic sequence
ctaaccgcttccc

SEQ ID NO: 401 - DNA, 13 bp, Artificial Sequence
  synthetic sequence
taatccaccacct

SEQ ID NO: 402 - DNA, 13 bp, Artificial Sequence
  synthetic sequence
aaaatcaaccttg

SEQ ID NO: 403 - DNA, 13 bp, Artificial Sequence
  synthetic sequence
atttgtttgtctc

SEQ ID NO: 404 - DNA, 13 bp, Artificial Sequence
  synthetic sequence
tcacagacatgtg

SEQ ID NO: 405 - DNA, 13 bp, Artificial Sequence
  synthetic sequence
attgctccccatg

SEQ ID NO: 406 - DNA, 13 bp, Artificial Sequence
  synthetic sequence
tttccatctctac

SEQ ID NO: 407 - DNA, 13 bp, Artificial Sequence
  synthetic sequence
ggtgctgattgaa

SEQ ID NO: 408 - DNA, 13 bp, Artificial Sequence
  synthetic sequence
atttcagcatcta

SEQ ID NO: 409 - DNA, 13 bp, Artificial Sequence
  synthetic sequence
ctattgaaaggaa

SEQ ID NO: 410 - DNA, 13 bp, Artificial Sequence
  synthetic sequence
gctcaagttttgt

SEQ ID NO: 411 - DNA, 13 bp, Artificial Sequence
  synthetic sequence
gtgacaaatccat

SEQ ID NO: 412 - DNA, 13 bp, Artificial Sequence
  synthetic sequence
taaaaaggtcttt

SEQ ID NO: 413 - DNA, 13 bp, Artificial Sequence
  synthetic sequence
agatgccagagct

SEQ ID NO: 414 - DNA, 13 bp, Artificial Sequence
  synthetic sequence
ctacagtagcatt

SEQ ID NO: 415 - DNA, 13 bp, Artificial Sequence
  synthetic sequence
cttgcctgcactt

SEQ ID NO: 416 - DNA, 13 bp, Artificial Sequence
  synthetic sequence
gcagaagcttcag

SEQ ID NO: 417 - DNA, 13 bp, Artificial Sequence
  synthetic sequence
tcagtggagacct

SEQ ID NO: 418 - DNA, 13 bp, Artificial Sequence
  synthetic sequence
ttttgcacatgca

SEQ ID NO: 419 - DNA, 13 bp, Artificial Sequence
  synthetic sequence
tcctagagcctgt

SEQ ID NO: 420 - DNA, 13 bp, Artificial Sequence
  synthetic sequence
tgcaagaaggcca

SEQ ID NO: 421 - DNA, 13 bp, Artificial Sequence
  synthetic sequence
caaacataaagaa

SEQ ID NO: 422 - DNA, 13 bp, Artificial Sequence
  synthetic sequence
tttgtacatgcat

SEQ ID NO: 423 - DNA, 13 bp, Artificial Sequence
  synthetic sequence
ttctgttgagtta

SEQ ID NO: 424 - DNA, 13 bp, Artificial Sequence
  synthetic sequence
tgtaaatggccat

SEQ ID NO: 425 - DNA, 13 bp, Artificial Sequence
  synthetic sequence
ttgtctgtgcttg

SEQ ID NO: 426 - DNA, 13 bp, Artificial Sequence
  synthetic sequence
taagcagagctaa

SEQ ID NO: 427 - DNA, 13 bp, Artificial Sequence
  synthetic sequence
atcacttgcactt

SEQ ID NO: 428 - DNA, 13 bp, Artificial Sequence
  synthetic sequence
aacacttaaagca

SEQ ID NO: 429 - DNA, 13 bp, Artificial Sequence
  synthetic sequence
tctttcacatcta

SEQ ID NO: 430 - DNA, 13 bp, Artificial Sequence
  synthetic sequence
agtacatctgaga

SEQ ID NO: 431 - DNA, 13 bp, Artificial Sequence
  synthetic sequence
caacctgtgcaag

SEQ ID NO: 432 - DNA, 13 bp, Artificial Sequence
  synthetic sequence
tgtctatttcaca

SEQ ID NO: 433 - DNA, 13 bp, Artificial Sequence
  synthetic sequence
gatctagccaatg

SEQ ID NO: 434 - DNA, 13 bp, Artificial Sequence
  synthetic sequence
ataagggcatata

SEQ ID NO: 435 - DNA, 13 bp, Artificial Sequence
  synthetic sequence
gcaatcttctaga

SEQ ID NO: 436 - DNA, 13 bp, Artificial Sequence
  synthetic sequence
tctaaggtgagat

SEQ ID NO: 437 - DNA, 13 bp, Artificial Sequence
  synthetic sequence
cattttacctaat

SEQ ID NO: 438 - DNA, 13 bp, Artificial Sequence
  synthetic sequence
tgttaacacattt

SEQ ID NO: 439 - DNA, 13 bp, Artificial Sequence
  synthetic sequence
tcctgcagatata

SEQ ID NO: 440 - DNA, 13 bp, Artificial Sequence
  synthetic sequence
agaaccagttgat

SEQ ID NO: 441 - DNA, 13 bp, Artificial Sequence
  synthetic sequence
gtacaagaaggcc

SEQ ID NO: 442 - DNA, 13 bp, Artificial Sequence
  synthetic sequence
tgcaggaaggcca

SEQ ID NO: 443 - DNA, 13 bp, Artificial Sequence
  synthetic sequence
ccatgacagaaac

SEQ ID NO: 444 - DNA, 13 bp, Artificial Sequence
  synthetic sequence
taagggcaacaaa

SEQ ID NO: 445 - DNA, 13 bp, Artificial Sequence
  synthetic sequence
tgcctcaattgat

SEQ ID NO: 446 - DNA, 13 bp, Artificial Sequence
  synthetic sequence
ctccagtatatgt

SEQ ID NO: 447 - DNA, 13 bp, Artificial Sequence
  synthetic sequence
gatctgaaaggca

SEQ ID NO: 448 - DNA, 13 bp, Artificial Sequence
  synthetic sequence
cagtaaggacaac

SEQ ID NO: 449 - DNA, 13 bp, Artificial Sequence
  synthetic sequence
gcctgagcacctt

SEQ ID NO: 450 - DNA, 13 bp, Artificial Sequence
  synthetic sequence
aggggttggtggt

SEQ ID NO: 451 - DNA, 13 bp, Artificial Sequence
  synthetic sequence
tccgtgaaaaggt

SEQ ID NO: 452 - DNA, 13 bp, Artificial Sequence
  synthetic sequence
taaatagagcaaa

SEQ ID NO: 453 - DNA, 13 bp, Artificial Sequence
  synthetic sequence
tcagacttgcaaa

SEQ ID NO: 454 - DNA, 13 bp, Artificial Sequence
  synthetic sequence
tgcttgtggcggt

SEQ ID NO: 455 - DNA, 13 bp, Artificial Sequence
  synthetic sequence
agatgtagcatat

SEQ ID NO: 456 - DNA, 13 bp, Artificial Sequence
  synthetic sequence
tgtcgacagcaga

SEQ ID NO: 457 - DNA, 13 bp, Artificial Sequence
  synthetic sequence
tggaacattttta

SEQ ID NO: 458 - DNA, 13 bp, Artificial Sequence
  synthetic sequence
tcttgagcccatg

SEQ ID NO: 459 - DNA, 13 bp, Artificial Sequence
  synthetic sequence
tggcagctggtct

SEQ ID NO: 460 - DNA, 13 bp, Artificial Sequence
  synthetic sequence
ttgattgcaacat

SEQ ID NO: 461 - DNA, 13 bp, Artificial Sequence
  synthetic sequence
aagctacaatagc

SEQ ID NO: 462 - DNA, 13 bp, Artificial Sequence
  synthetic sequence
tctgagtgtcatc

SEQ ID NO: 463 - DNA, 13 bp, Artificial Sequence
  synthetic sequence
aacagaagcctcc

SEQ ID NO: 464 - DNA, 13 bp, Artificial Sequence
  synthetic sequence
atgaaactactag

SEQ ID NO: 465 - DNA, 13 bp, Artificial Sequence
  synthetic sequence
actatcgatctca

SEQ ID NO: 466 - DNA, 13 bp, Artificial Sequence
  synthetic sequence
cgtgttgttctca

SEQ ID NO: 467 - DNA, 13 bp, Artificial Sequence
  synthetic sequence
ccggtgacaatga

SEQ ID NO: 468 - DNA, 13 bp, Artificial Sequence
  synthetic sequence
caatattttgctg

SEQ ID NO: 469 - DNA, 13 bp, Artificial Sequence
  synthetic sequence
ttcagctgttggt

SEQ ID NO: 470 - DNA, 13 bp, Artificial Sequence
  synthetic sequence
tagccattttgcc

SEQ ID NO: 471 - DNA, 13 bp, Artificial Sequence
  synthetic sequence
gatttaaagggtt

SEQ ID NO: 472 - DNA, 13 bp, Artificial Sequence
  synthetic sequence
gcttgtgcttgat

SEQ ID NO: 473 - DNA, 13 bp, Artificial Sequence
  synthetic sequence
tccatccaaacat

SEQ ID NO: 474 - DNA, 13 bp, Artificial Sequence
  synthetic sequence
gtatcttaccgta

SEQ ID NO: 475 - DNA, 13 bp, Artificial Sequence
  synthetic sequence
atatgcagttccc

SEQ ID NO: 476 - DNA, 13 bp, Artificial Sequence
  synthetic sequence
gttgtaactgcaa

SEQ ID NO: 477 - DNA, 13 bp, Artificial Sequence
  synthetic sequence
cacagccctttaa

SEQ ID NO: 478 - DNA, 13 bp, Artificial Sequence
  synthetic sequence
aagcagacaccca

SEQ ID NO: 479 - DNA, 13 bp, Artificial Sequence
  synthetic sequence
caagtgctattcc

SEQ ID NO: 480 - DNA, 13 bp, Artificial Sequence
  synthetic sequence
caatctgtgcacc

SEQ ID NO: 481 - DNA, 13 bp, Artificial Sequence
  synthetic sequence
tttgcattgacac

SEQ ID NO: 482 - DNA, 13 bp, Artificial Sequence
  synthetic sequence
tgttggcactggt

SEQ ID NO: 483 - DNA, 13 bp, Artificial Sequence
  synthetic sequence
cttgtagcgttgc

SEQ ID NO: 484 - DNA, 13 bp, Artificial Sequence
  synthetic sequence
ctatgtcctttct

SEQ ID NO: 485 - DNA, 13 bp, Artificial Sequence
  synthetic sequence
cgcgcagcccttt

SEQ ID NO: 486 - DNA, 13 bp, Artificial Sequence
  synthetic sequence
ttgacacggaaac

SEQ ID NO: 487 - DNA, 13 bp, Artificial Sequence
  synthetic sequence
atgttagcactgg

SEQ ID NO: 488 - DNA, 13 bp, Artificial Sequence
  synthetic sequence
gtcaatctgagca

SEQ ID NO: 489 - DNA, 13 bp, Artificial Sequence
  synthetic sequence
acaagcgctatcc

SEQ ID NO: 490 - DNA, 13 bp, Artificial Sequence
  synthetic sequence
ttgaaggccctgc

SEQ ID NO: 491 - DNA, 13 bp, Artificial Sequence
  synthetic sequence
cccagctgatctc

SEQ ID NO: 492 - DNA, 13 bp, Artificial Sequence
  synthetic sequence
acacacggtctac

SEQ ID NO: 493 - DNA, 13 bp, Artificial Sequence
  synthetic sequence
atttgtgatcaaa

SEQ ID NO: 494 - DNA, 13 bp, Artificial Sequence
  synthetic sequence
acaaccccgttca

SEQ ID NO: 495 - DNA, 13 bp, Artificial Sequence
  synthetic sequence
actctcaggcacc

SEQ ID NO: 496 - DNA, 13 bp, Artificial Sequence
  synthetic sequence
aagctcagaggac

SEQ ID NO: 497 - DNA, 13 bp, Artificial Sequence
  synthetic sequence
agatcatagatgc

SEQ ID NO: 498 - DNA, 13 bp, Artificial Sequence
  synthetic sequence
acgatgaagagtg

SEQ ID NO: 499 - DNA, 13 bp, Artificial Sequence
  synthetic sequence
atcttcgacaaca

SEQ ID NO: 500 - DNA, 13 bp, Artificial Sequence
  synthetic sequence
catgccgtcacag

SEQ ID NO: 501 - DNA, 13 bp, Artificial Sequence
  synthetic sequence
taaccagaaaagg

SEQ ID NO: 502 - DNA, 13 bp, Artificial Sequence
  synthetic sequence
caggcggtgtaca

SEQ ID NO: 503 - DNA, 13 bp, Artificial Sequence
  synthetic sequence
gggcaggtgggta

SEQ ID NO: 504 - DNA, 13 bp, Artificial Sequence
  synthetic sequence
tcggtgcccacac

SEQ ID NO: 505 - DNA, 13 bp, Artificial Sequence
  synthetic sequence
tgcaccctgacag

SEQ ID NO: 506 - DNA, 13 bp, Artificial Sequence
  synthetic sequence
tgatagaggctgc

SEQ ID NO: 507 - DNA, 13 bp, Artificial Sequence
  synthetic sequence
caccgacgtgatg

SEQ ID NO: 508 - DNA, 13 bp, Artificial Sequence
  synthetic sequence
acaaagtaatgaa

SEQ ID NO: 509 - DNA, 13 bp, Artificial Sequence
  synthetic sequence
gtcgaagcgtacg

SEQ ID NO: 510 - DNA, 13 bp, Artificial Sequence
  synthetic sequence
cccgagagactcg

SEQ ID NO: 511 - DNA, 13 bp, Artificial Sequence
  synthetic sequence
tgatcagagcata

SEQ ID NO: 512 - DNA, 13 bp, Artificial Sequence
  synthetic sequence
agaaggaagaagc

SEQ ID NO: 513 - DNA, 13 bp, Artificial Sequence
  synthetic sequence
atgtgcatgtgtg

SEQ ID NO: 514 - DNA, 13 bp, Artificial Sequence
  synthetic sequence
acagctgtaaggt

SEQ ID NO: 515 - DNA, 13 bp, Artificial Sequence
  synthetic sequence
gggtatatcagtt

SEQ ID NO: 516 - DNA, 13 bp, Artificial Sequence
  synthetic sequence
gacgggtcggaga

SEQ ID NO: 517 - DNA, 13 bp, Artificial Sequence
  synthetic sequence
atgggagaagaac

SEQ ID NO: 518 - DNA, 13 bp, Artificial Sequence
  synthetic sequence
actgcctactaag

SEQ ID NO: 519 - DNA, 13 bp, Artificial Sequence
  synthetic sequence
cgaccgcagcacg

SEQ ID NO: 520 - DNA, 13 bp, Artificial Sequence
  synthetic sequence
actgggaagaatt

SEQ ID NO: 521 - DNA, 13 bp, Artificial Sequence
  synthetic sequence
gctgcctatcgag

SEQ ID NO: 522 - DNA, 13 bp, Artificial Sequence
  synthetic sequence
tgattaataactg

SEQ ID NO: 523 - DNA, 13 bp, Artificial Sequence
  synthetic sequence
catcggtgttcca

SEQ ID NO: 524 - DNA, 13 bp, Artificial Sequence
  synthetic sequence
attaaatatgcag

SEQ ID NO: 525 - DNA, 13 bp, Artificial Sequence
  synthetic sequence
ttgcggccgtgtc

SEQ ID NO: 526 - DNA, 13 bp, Artificial Sequence
  synthetic sequence
caggcagcacagg

SEQ ID NO: 527 - DNA, 13 bp, Artificial Sequence
  synthetic sequence
agaaacagcggag

SEQ ID NO: 528 - DNA, 13 bp, Artificial Sequence
  synthetic sequence
gaataaagacgga

SEQ ID NO: 529 - DNA, 13 bp, Artificial Sequence
  synthetic sequence
aagccaacgtttg

SEQ ID NO: 530 - DNA, 13 bp, Artificial Sequence
  synthetic sequence
gcatcatctcccc

SEQ ID NO: 531 - DNA, 13 bp, Artificial Sequence
  synthetic sequence
cagagactaaaga

SEQ ID NO: 532 - DNA, 13 bp, Artificial Sequence
  synthetic sequence
gacaacgtcatga

SEQ ID NO: 533 - DNA, 13 bp, Artificial Sequence
  synthetic sequence
agagctggttagg

SEQ ID NO: 534 - DNA, 13 bp, Artificial Sequence
  synthetic sequence
cacgtcactgacg

SEQ ID NO: 535 - DNA, 13 bp, Artificial Sequence
  synthetic sequence
aataggcctggag

SEQ ID NO: 536 - DNA, 13 bp, Artificial Sequence
  synthetic sequence
aagatgttcggat

SEQ ID NO: 537 - DNA, 13 bp, Artificial Sequence
  synthetic sequence
gttaggagattga

SEQ ID NO: 538 - DNA, 13 bp, Artificial Sequence
  synthetic sequence
cttgcgcatgctt

SEQ ID NO: 539 - DNA, 13 bp, Artificial Sequence
  synthetic sequence
atgaaagcaacaa

SEQ ID NO: 540 - DNA, 13 bp, Artificial Sequence
  synthetic sequence
agtttgatctaag

SEQ ID NO: 541 - DNA, 13 bp, Artificial Sequence
  synthetic sequence
gccgttatgccat

SEQ ID NO: 542 - DNA, 13 bp, Artificial Sequence
  synthetic sequence
acaggcggcacag

SEQ ID NO: 543 - DNA, 13 bp, Artificial Sequence
  synthetic sequence
agcagagtgcaag

SEQ ID NO: 544 - DNA, 13 bp, Artificial Sequence
  synthetic sequence
ataacgactgaga

SEQ ID NO: 545 - DNA, 13 bp, Artificial Sequence
  synthetic sequence
catgtgctcctgg

SEQ ID NO: 546 - DNA, 13 bp, Artificial Sequence
  synthetic sequence
aggtatgaagtgc

SEQ ID NO: 547 - DNA, 13 bp, Artificial Sequence
  synthetic sequence
agccacgattgga

SEQ ID NO: 548 - DNA, 13 bp, Artificial Sequence
  synthetic sequence
acacgttccagaa

SEQ ID NO: 549 - DNA, 13 bp, Artificial Sequence
  synthetic sequence
cacgaggagtggg

SEQ ID NO: 550 - DNA, 13 bp, Artificial Sequence
  synthetic sequence
aagaccctgagag

SEQ ID NO: 551 - DNA, 13 bp, Artificial Sequence
  synthetic sequence
tttcggctgtgtc

SEQ ID NO: 552 - DNA, 13 bp, Artificial Sequence
  synthetic sequence
tgatcagggcata

SEQ ID NO: 553 - DNA, 13 bp, Artificial Sequence
  synthetic sequence
ccgtaagcttctt

SEQ ID NO: 554 - DNA, 13 bp, Artificial Sequence
  synthetic sequence
cttgaccgggcga

SEQ ID NO: 555 - DNA, 13 bp, Artificial Sequence
  synthetic sequence
gtacgcggtcgaa

SEQ ID NO: 556 - DNA, 13 bp, Artificial Sequence
  synthetic sequence
gaggaggcagccg

SEQ ID NO: 557 - DNA, 13 bp, Artificial Sequence
  synthetic sequence
agctagcaagaaa

SEQ ID NO: 558 - DNA, 13 bp, Artificial Sequence
  synthetic sequence
cacctgtgatagg

SEQ ID NO: 559 - DNA, 13 bp, Artificial Sequence
  synthetic sequence
gagatacgcgata

SEQ ID NO: 560 - DNA, 13 bp, Artificial Sequence
  synthetic sequence
agtcactaatcac

SEQ ID NO: 561 - DNA, 13 bp, Artificial Sequence
  synthetic sequence
cacagagagttgg

SEQ ID NO: 562 - DNA, 13 bp, Artificial Sequence
  synthetic sequence
ggcgcagatgcat

SEQ ID NO: 563 - DNA, 13 bp, Artificial Sequence
  synthetic sequence
gtgactagactag

SEQ ID NO: 564 - DNA, 13 bp, Artificial Sequence
  synthetic sequence
tggtgggggataa

SEQ ID NO: 565 - DNA, 13 bp, Artificial Sequence
  synthetic sequence
tgggctaagagct

SEQ ID NO: 566 - DNA, 13 bp, Artificial Sequence
  synthetic sequence
ttcgacctaagcg

SEQ ID NO: 567 - DNA, 13 bp, Artificial Sequence
  synthetic sequence
ccgtgcctttgcc

SEQ ID NO: 568 - DNA, 13 bp, Artificial Sequence
  synthetic sequence
ggagagatttcca

SEQ ID NO: 569 - DNA, 13 bp, Artificial Sequence
  synthetic sequence
ccatgattggacc

SEQ ID NO: 570 - DNA, 13 bp, Artificial Sequence
  synthetic sequence
gacagcgcctttt

SEQ ID NO: 571 - DNA, 13 bp, Artificial Sequence
  synthetic sequence
gagatatctgcac

SEQ ID NO: 572 - DNA, 13 bp, Artificial Sequence
  synthetic sequence
ggacgacgagtta

SEQ ID NO: 573 - DNA, 13 bp, Artificial Sequence
  synthetic sequence
aagtatctccagg

SEQ ID NO: 574 - DNA, 13 bp, Artificial Sequence
  synthetic sequence
acaaccagtccca

SEQ ID NO: 575 - DNA, 13 bp, Artificial Sequence
  synthetic sequence
tgcatcatattga

SEQ ID NO: 576 - DNA, 13 bp, Artificial Sequence
  synthetic sequence
ctgttcgttgcca

SEQ ID NO: 577 - DNA, 13 bp, Artificial Sequence
  synthetic sequence
ctgctgtcatgac

SEQ ID NO: 578 - DNA, 13 bp, Artificial Sequence
  synthetic sequence
ctttaatcgcctg

SEQ ID NO: 579 - DNA, 13 bp, Artificial Sequence
  synthetic sequence
ttccttggtaaag

SEQ ID NO: 580 - DNA, 13 bp, Artificial Sequence
  synthetic sequence
cgctagccatggg

SEQ ID NO: 581 - DNA, 13 bp, Artificial Sequence
  synthetic sequence
ggcagttttcttt

SEQ ID NO: 582 - DNA, 13 bp, Artificial Sequence
  synthetic sequence
caaaggtggccat

SEQ ID NO: 583 - DNA, 13 bp, Artificial Sequence
  synthetic sequence
attcccttggact

SEQ ID NO: 584 - DNA, 13 bp, Artificial Sequence
  synthetic sequence
tttcgtagcagca

SEQ ID NO: 585 - DNA, 13 bp, Artificial Sequence
  synthetic sequence
gcttgacttcgaa

SEQ ID NO: 586 - DNA, 13 bp, Artificial Sequence
  synthetic sequence
tggtcaggataca

SEQ ID NO: 587 - DNA, 13 bp, Artificial Sequence
  synthetic sequence
atactttccccca

SEQ ID NO: 588 - DNA, 13 bp, Artificial Sequence
  synthetic sequence
acgtggaccagtc

SEQ ID NO: 589 - DNA, 13 bp, Artificial Sequence
  synthetic sequence
ctgagcttctggc

SEQ ID NO: 590 - DNA, 13 bp, Artificial Sequence
  synthetic sequence
gagaacagcacac

SEQ ID NO: 591 - DNA, 13 bp, Artificial Sequence
  synthetic sequence
tgctcatccagca

SEQ ID NO: 592 - DNA, 13 bp, Artificial Sequence
  synthetic sequence
acactccacgttg

SEQ ID NO: 593 - DNA, 13 bp, Artificial Sequence
  synthetic sequence
tttccccttttac

SEQ ID NO: 594 - DNA, 13 bp, Artificial Sequence
  synthetic sequence
gcatttgcagttt

SEQ ID NO: 595 - DNA, 13 bp, Artificial Sequence
  synthetic sequence
tctctgccctcac

SEQ ID NO: 596 - DNA, 13 bp, Artificial Sequence
  synthetic sequence
tgctccacctccc

SEQ ID NO: 597 - DNA, 13 bp, Artificial Sequence
  synthetic sequence
gcctgtataacct

SEQ ID NO: 598 - DNA, 13 bp, Artificial Sequence
  synthetic sequence
catcctgctcggg

SEQ ID NO: 599 - DNA, 13 bp, Artificial Sequence
  synthetic sequence
gttctttctctga

SEQ ID NO: 600 - DNA, 13 bp, Artificial Sequence
  synthetic sequence
ggtgaaatgggtg

SEQ ID NO: 601 - DNA, 13 bp, Artificial Sequence
  synthetic sequence
ctcctgagtactg

SEQ ID NO: 602 - DNA, 13 bp, Artificial Sequence
  synthetic sequence
cacgtacggagac

SEQ ID NO: 603 - DNA, 13 bp, Artificial Sequence
  synthetic sequence
catctggctgcca

SEQ ID NO: 604 - DNA, 13 bp, Artificial Sequence
  synthetic sequence
aatcagggctgcc

SEQ ID NO: 605 - DNA, 13 bp, Artificial Sequence
  synthetic sequence
atgcatcatactc

SEQ ID NO: 606 - DNA, 13 bp, Artificial Sequence
  synthetic sequence
ccgtctgtcgctt

SEQ ID NO: 607 - DNA, 13 bp, Artificial Sequence
  synthetic sequence
cacaccgagaatg

SEQ ID NO: 608 - DNA, 13 bp, Artificial Sequence
  synthetic sequence
gcgtaatacacag

SEQ ID NO: 609 - DNA, 13 bp, Artificial Sequence
  synthetic sequence
gtgacgccgggta

SEQ ID NO: 610 - DNA, 13 bp, Artificial Sequence
  synthetic sequence
cggtctctgcagt

SEQ ID NO: 611 - DNA, 13 bp, Artificial Sequence
  synthetic sequence
tgggtgcaggctg

SEQ ID NO: 612 - DNA, 13 bp, Artificial Sequence
  synthetic sequence
gagaagtttggtc

SEQ ID NO: 613 - DNA, 13 bp, Artificial Sequence
  synthetic sequence
tgatacctgcttc

SEQ ID NO: 614 - DNA, 13 bp, Artificial Sequence
  synthetic sequence
ccccgtcgtctag

SEQ ID NO: 615 - DNA, 13 bp, Artificial Sequence
  synthetic sequence
gacaggagtatga

SEQ ID NO: 616 - DNA, 13 bp, Artificial Sequence
  synthetic sequence
agggagtgatcca

SEQ ID NO: 617 - DNA, 13 bp, Artificial Sequence
  synthetic sequence
caccgcaattaca

SEQ ID NO: 618 - DNA, 13 bp, Artificial Sequence
  synthetic sequence
gcggtctgggcct

SEQ ID NO: 619 - DNA, 13 bp, Artificial Sequence
  synthetic sequence
ttcctttgcggac

SEQ ID NO: 620 - DNA, 13 bp, Artificial Sequence
  synthetic sequence
agtggttaatcct

SEQ ID NO: 621 - DNA, 13 bp, Artificial Sequence
  synthetic sequence
tctgcttcttttt

SEQ ID NO: 622 - DNA, 13 bp, Artificial Sequence
  synthetic sequence
agtgatccactcc

SEQ ID NO: 623 - DNA, 13 bp, Artificial Sequence
  synthetic sequence
acgaacgaggcca

SEQ ID NO: 624 - DNA, 13 bp, Artificial Sequence
  synthetic sequence
cagcaacagcaac

SEQ ID NO: 625 - DNA, 13 bp, Artificial Sequence
  synthetic sequence
ggtacctgcttct

SEQ ID NO: 626 - DNA, 13 bp, Artificial Sequence
  synthetic sequence
gctggttctaggg

SEQ ID NO: 627 - DNA, 13 bp, Artificial Sequence
  synthetic sequence
acgcccccaaagt

SEQ ID NO: 628 - DNA, 13 bp, Artificial Sequence
  synthetic sequence
gggtggtgtgtga

SEQ ID NO: 629 - DNA, 13 bp, Artificial Sequence
  synthetic sequence
atgcatcgtactc

SEQ ID NO: 630 - DNA, 13 bp, Artificial Sequence
  synthetic sequence
ccgaaaatgacac

SEQ ID NO: 631 - DNA, 13 bp, Artificial Sequence
  synthetic sequence
cttcacgtacggg

SEQ ID NO: 632 - DNA, 13 bp, Artificial Sequence
  synthetic sequence
tcagacagttgca

SEQ ID NO: 633 - DNA, 13 bp, Artificial Sequence
  synthetic sequence
gagtaatttgaga

SEQ ID NO: 634 - DNA, 13 bp, Artificial Sequence
  synthetic sequence
caacaggggatga

SEQ ID NO: 635 - DNA, 13 bp, Artificial Sequence
  synthetic sequence
gtggacgtggtct

SEQ ID NO: 636 - DNA, 13 bp, Artificial Sequence
  synthetic sequence
catttgtatggcc

SEQ ID NO: 637 - DNA, 13 bp, Artificial Sequence
  synthetic sequence
gctctgtcctttc

SEQ ID NO: 638 - DNA, 13 bp, Artificial Sequence
  synthetic sequence
aagcactcaacat

SEQ ID NO: 639 - DNA, 13 bp, Artificial Sequence
  synthetic sequence
ggcctctgtagta

SEQ ID NO: 640 - DNA, 13 bp, Artificial Sequence
  synthetic sequence
ttattgaagcatg

SEQ ID NO: 641 - DNA, 13 bp, Artificial Sequence
  synthetic sequence
gattttcagcgtt

SEQ ID NO: 642 - DNA, 13 bp, Artificial Sequence
  synthetic sequence
tgagaacagtacg

SEQ ID NO: 643 - DNA, 13 bp, Artificial Sequence
  synthetic sequence
gacaaccccatgt

SEQ ID NO: 644 - DNA, 13 bp, Artificial Sequence
  synthetic sequence
cataatgcacgga

SEQ ID NO: 645 - DNA, 13 bp, Artificial Sequence
  synthetic sequence
gtggttgtcagtc

SEQ ID NO: 646 - DNA, 13 bp, Artificial Sequence
  synthetic sequence
ttgttgaccaacc

SEQ ID NO: 647 - DNA, 13 bp, Artificial Sequence
  synthetic sequence
gcctgtatgacct

SEQ ID NO: 648 - DNA, 13 bp, Artificial Sequence
  synthetic sequence
ctttctctgatgc

SEQ ID NO: 649 - DNA, 13 bp, Artificial Sequence
  synthetic sequence
ctccgagcatctg

SEQ ID NO: 650 - DNA, 13 bp, Artificial Sequence
  synthetic sequence
atctttctgctgt

SEQ ID NO: 651 - DNA, 13 bp, Artificial Sequence
  synthetic sequence
aaccggcctcctg

SEQ ID NO: 652 - DNA, 13 bp, Artificial Sequence
  synthetic sequence
cgctctgtcgtct

SEQ ID NO: 653 - DNA, 13 bp, Artificial Sequence
  synthetic sequence
accctgctcgggt

SEQ ID NO: 654 - DNA, 13 bp, Artificial Sequence
  synthetic sequence
cttcacttgctcc

SEQ ID NO: 655 - DNA, 13 bp, Artificial Sequence
  synthetic sequence
tcagtgctgcaac

SEQ ID NO: 656 - DNA, 13 bp, Artificial Sequence
  synthetic sequence
tcgctgtctgtca

SEQ ID NO: 657 - DNA, 13 bp, Artificial Sequence
  synthetic sequence
cagtagcatgatg

SEQ ID NO: 658 - DNA, 13 bp, Artificial Sequence
  synthetic sequence
taccttaccttca

SEQ ID NO: 659 - DNA, 13 bp, Artificial Sequence
  synthetic sequence
gactcctgggaag

SEQ ID NO: 660 - DNA, 13 bp, Artificial Sequence
  synthetic sequence
tgcctgattgatt

SEQ ID NO: 661 - DNA, 13 bp, Artificial Sequence
  synthetic sequence
cgaaggtggccat

SEQ ID NO: 662 - DNA, 13 bp, Artificial Sequence
  synthetic sequence
cccggtccccttc

SEQ ID NO: 663 - DNA, 13 bp, Artificial Sequence
  synthetic sequence
ttagagagcagat

SEQ ID NO: 664 - DNA, 13 bp, Artificial Sequence
  synthetic sequence
acaccagaaggga

SEQ ID NO: 665 - DNA, 13 bp, Artificial Sequence
  synthetic sequence
aaccaagatgaac

SEQ ID NO: 666 - DNA, 13 bp, Artificial Sequence
  synthetic sequence
aaaccaacattgg

SEQ ID NO: 667 - DNA, 13 bp, Artificial Sequence
  synthetic sequence
ggacaaaagaagg

SEQ ID NO: 668 - DNA, 13 bp, Artificial Sequence
  synthetic sequence
gatgaggaaagag

SEQ ID NO: 669 - DNA, 13 bp, Artificial Sequence
  synthetic sequence
aacccatggatgg

SEQ ID NO: 670 - DNA, 13 bp, Artificial Sequence
  synthetic sequence
gaacacacaggaa

SEQ ID NO: 671 - DNA, 13 bp, Artificial Sequence
  synthetic sequence
ggtttgtggagag

SEQ ID NO: 672 - DNA, 13 bp, Artificial Sequence
  synthetic sequence
tggctagatgggg

SEQ ID NO: 673 - DNA, 13 bp, Artificial Sequence
  synthetic sequence
gacagccattgca

SEQ ID NO: 674 - DNA, 13 bp, Artificial Sequence
  synthetic sequence
ggaccatgaaaat

SEQ ID NO: 675 - DNA, 13 bp, Artificial Sequence
  synthetic sequence
cccaagacaacca

SEQ ID NO: 676 - DNA, 13 bp, Artificial Sequence
  synthetic sequence
aacatgtgcaccc

SEQ ID NO: 677 - DNA, 13 bp, Artificial Sequence
  synthetic sequence
caatgaaagaaaa

SEQ ID NO: 678 - DNA, 13 bp, Artificial Sequence
  synthetic sequence
gaagaggtgatga

SEQ ID NO: 679 - DNA, 13 bp, Artificial Sequence
  synthetic sequence
taccagagattga

SEQ ID NO: 680 - DNA, 13 bp, Artificial Sequence
  synthetic sequence
agagaggagttca

SEQ ID NO: 681 - DNA, 13 bp, Artificial Sequence
  synthetic sequence
tgaacattgtgga

SEQ ID NO: 682 - DNA, 13 bp, Artificial Sequence
  synthetic sequence
atagaaagtgaaa

SEQ ID NO: 683 - DNA, 13 bp, Artificial Sequence
  synthetic sequence
aaggcatgggagg

SEQ ID NO: 684 - DNA, 13 bp, Artificial Sequence
  synthetic sequence
gtggtgataggtt

SEQ ID NO: 685 - DNA, 13 bp, Artificial Sequence
  synthetic sequence
gatcagcctcatc

SEQ ID NO: 686 - DNA, 13 bp, Artificial Sequence
  synthetic sequence
gtgatattggtga

SEQ ID NO: 687 - DNA, 13 bp, Artificial Sequence
  synthetic sequence
cagtcaacattga

SEQ ID NO: 688 - DNA, 13 bp, Artificial Sequence
  synthetic sequence
tagcaggagcagg

SEQ ID NO: 689 - DNA, 13 bp, Artificial Sequence
  synthetic sequence
aagaagtgcaggt

SEQ ID NO: 690 - DNA, 13 bp, Artificial Sequence
  synthetic sequence
cagacaccataga

SEQ ID NO: 691 - DNA, 13 bp, Artificial Sequence
  synthetic sequence
tatgggacacacc

SEQ ID NO: 692 - DNA, 13 bp, Artificial Sequence
  synthetic sequence
gaagctcagccga

SEQ ID NO: 693 - DNA, 13 bp, Artificial Sequence
  synthetic sequence
cttggtttcatga

SEQ ID NO: 694 - DNA, 13 bp, Artificial Sequence
  synthetic sequence
aaacaacatggct

SEQ ID NO: 695 - DNA, 13 bp, Artificial Sequence
  synthetic sequence
gtggagacttggg

SEQ ID NO: 696 - DNA, 13 bp, Artificial Sequence
  synthetic sequence
aagtgtgtgacaa

SEQ ID NO: 697 - DNA, 13 bp, Artificial Sequence
  synthetic sequence
gctaaaatcatag

SEQ ID NO: 698 - DNA, 13 bp, Artificial Sequence
  synthetic sequence
attgttgcaatag

SEQ ID NO: 699 - DNA, 13 bp, Artificial Sequence
  synthetic sequence
caacagcagggat

SEQ ID NO: 700 - DNA, 13 bp, Artificial Sequence
  synthetic sequence
tggacaaaggaag

SEQ ID NO: 701 - DNA, 13 bp, Artificial Sequence
  synthetic sequence
gaacagggtgtgg

SEQ ID NO: 702 - DNA, 13 bp, Artificial Sequence
  synthetic sequence
cgaaaggctgaaa

SEQ ID NO: 703 - DNA, 13 bp, Artificial Sequence
  synthetic sequence
tagaagcagaacc

SEQ ID NO: 704 - DNA, 13 bp, Artificial Sequence
  synthetic sequence
tggcatctgtgga

SEQ ID NO: 705 - DNA, 13 bp, Artificial Sequence
  synthetic sequence
ggatcagcatcat

SEQ ID NO: 706 - DNA, 13 bp, Artificial Sequence
  synthetic sequence
agggttatagacc

SEQ ID NO: 707 - DNA, 13 bp, Artificial Sequence
  synthetic sequence
attgtgtcagcag

SEQ ID NO: 708 - DNA, 13 bp, Artificial Sequence
  synthetic sequence
gtgacatagggga

SEQ ID NO: 709 - DNA, 13 bp, Artificial Sequence
  synthetic sequence
tagtgtcatcagt

SEQ ID NO: 710 - DNA, 13 bp, Artificial Sequence
  synthetic sequence
cagagaattgaaa

SEQ ID NO: 711 - DNA, 13 bp, Artificial Sequence
  synthetic sequence
aaggaatcattcc

SEQ ID NO: 712 - DNA, 13 bp, Artificial Sequence
  synthetic sequence
acacatggaagat

SEQ ID NO: 713 - DNA, 13 bp, Artificial Sequence
  synthetic sequence
cggattggatacc

SEQ ID NO: 714 - DNA, 13 bp, Artificial Sequence
  synthetic sequence
ccagaatcccctt

SEQ ID NO: 715 - DNA, 13 bp, Artificial Sequence
  synthetic sequence
gacccaagacggt

SEQ ID NO: 716 - DNA, 13 bp, Artificial Sequence
  synthetic sequence
ggaaatagaggac

SEQ ID NO: 717 - DNA, 13 bp, Artificial Sequence
  synthetic sequence
taccaaaacaagg

SEQ ID NO: 718 - DNA, 13 bp, Artificial Sequence
  synthetic sequence
tgagaatggacaa

SEQ ID NO: 719 - DNA, 13 bp, Artificial Sequence
  synthetic sequence
catgcaaaaagaa

SEQ ID NO: 720 - DNA, 13 bp, Artificial Sequence
  synthetic sequence
ccagagaagaatt

SEQ ID NO: 721 - DNA, 13 bp, Artificial Sequence
  synthetic sequence
ggaacgaaacatg

SEQ ID NO: 722 - DNA, 13 bp, Artificial Sequence
  synthetic sequence
tggactatgaaaa

SEQ ID NO: 723 - DNA, 13 bp, Artificial Sequence
  synthetic sequence
tgactctaaaagg

SEQ ID NO: 724 - DNA, 13 bp, Artificial Sequence
  synthetic sequence
agtgaactgccgg

SEQ ID NO: 725 - DNA, 13 bp, Artificial Sequence
  synthetic sequence
agtttgaagccct

SEQ ID NO: 726 - DNA, 13 bp, Artificial Sequence
  synthetic sequence
tggacttgggaga

SEQ ID NO: 727 - DNA, 13 bp, Artificial Sequence
  synthetic sequence
ggaataacagtga

SEQ ID NO: 728 - DNA, 13 bp, Artificial Sequence
  synthetic sequence
cttggctggtgca

SEQ ID NO: 729 - DNA, 13 bp, Artificial Sequence
  synthetic sequence
atgtgtcatgcca

SEQ ID NO: 730 - DNA, 13 bp, Artificial Sequence
  synthetic sequence
ggagtattgtggg

SEQ ID NO: 731 - DNA, 13 bp, Artificial Sequence
  synthetic sequence
gcattgaagacaa

SEQ ID NO: 732 - DNA, 13 bp, Artificial Sequence
  synthetic sequence
ggacttctctttt

SEQ ID NO: 733 - DNA, 13 bp, Artificial Sequence
  synthetic sequence
ttggaactggaga

SEQ ID NO: 734 - DNA, 13 bp, Artificial Sequence
  synthetic sequence
gccctactggcta

SEQ ID NO: 735 - DNA, 13 bp, Artificial Sequence
  synthetic sequence
cagctatagccaa

SEQ ID NO: 736 - DNA, 13 bp, Artificial Sequence
  synthetic sequence
aaaatgctctcca

SEQ ID NO: 737 - DNA, 13 bp, Artificial Sequence
  synthetic sequence
caagagtggggcg

SEQ ID NO: 738 - DNA, 13 bp, Artificial Sequence
  synthetic sequence
gaaggagcttgga

SEQ ID NO: 739 - DNA, 13 bp, Artificial Sequence
  synthetic sequence
caagatgaagaaa

SEQ ID NO: 740 - DNA, 13 bp, Artificial Sequence
  synthetic sequence
gaacctccttttg

SEQ ID NO: 741 - DNA, 13 bp, Artificial Sequence
  synthetic sequence
gtgacattggaga

SEQ ID NO: 742 - DNA, 13 bp, Artificial Sequence
  synthetic sequence
atgataaatggag

SEQ ID NO: 743 - DNA, 13 bp, Artificial Sequence
  synthetic sequence
atagagggaaaag

SEQ ID NO: 744 - DNA, 13 bp, Artificial Sequence
  synthetic sequence
ccaagaagatgtc

SEQ ID NO: 745 - DNA, 13 bp, Artificial Sequence
  synthetic sequence
caatagacctaga

SEQ ID NO: 746 - DNA, 13 bp, Artificial Sequence
  synthetic sequence
acaatggaaacac

SEQ ID NO: 747 - DNA, 13 bp, Artificial Sequence
  synthetic sequence
tagtgacagctga

SEQ ID NO: 748 - DNA, 13 bp, Artificial Sequence
  synthetic sequence
caagggaagagtt

SEQ ID NO: 749 - DNA, 13 bp, Artificial Sequence
  synthetic sequence
aaggagtggagag

SEQ ID NO: 750 - DNA, 13 bp, Artificial Sequence
  synthetic sequence
gggacaagaggcc

SEQ ID NO: 751 - DNA, 13 bp, Artificial Sequence
  synthetic sequence
aaaagaatggaag

SEQ ID NO: 752 - DNA, 13 bp, Artificial Sequence
  synthetic sequence
caggagctgggct

SEQ ID NO: 753 - DNA, 13 bp, Artificial Sequence
  synthetic sequence
taccaaaacaaag

SEQ ID NO: 754 - DNA, 13 bp, Artificial Sequence
  synthetic sequence
atgaggaaaacag

SEQ ID NO: 755 - DNA, 13 bp, Artificial Sequence
  synthetic sequence
gaactcaagggga

SEQ ID NO: 756 - DNA, 13 bp, Artificial Sequence
  synthetic sequence
tgctactgaacag

SEQ ID NO: 757 - DNA, 13 bp, Artificial Sequence
  synthetic sequence
ggagccaggtacc

SEQ ID NO: 758 - DNA, 13 bp, Artificial Sequence
  synthetic sequence
tggatggtacata

SEQ ID NO: 759 - DNA, 13 bp, Artificial Sequence
  synthetic sequence
aggtgcaggttat

SEQ ID NO: 760 - DNA, 13 bp, Artificial Sequence
  synthetic sequence
atgagatccagat

SEQ ID NO: 761 - DNA, 13 bp, Artificial Sequence
  synthetic sequence
atggcaacaacgt

SEQ ID NO: 762 - DNA, 13 bp, Artificial Sequence
  synthetic sequence
cgtcagcagacct

SEQ ID NO: 763 - DNA, 13 bp, Artificial Sequence
  synthetic sequence
accatggctaaga

SEQ ID NO: 764 - DNA, 13 bp, Artificial Sequence
  synthetic sequence
aaaattggaatag

SEQ ID NO: 765 - DNA, 13 bp, Artificial Sequence
  synthetic sequence
ggaattgatgatg

SEQ ID NO: 766 - DNA, 13 bp, Artificial Sequence
  synthetic sequence
ggcgttctatggg

SEQ ID NO: 767 - DNA, 13 bp, Artificial Sequence
  synthetic sequence
acatgtgtaccct

SEQ ID NO: 768 - DNA, 13 bp, Artificial Sequence
  synthetic sequence
tccctaacagcca

SEQ ID NO: 769 - DNA, 13 bp, Artificial Sequence
  synthetic sequence
aagcttgcttaac

SEQ ID NO: 770 - DNA, 13 bp, Artificial Sequence
  synthetic sequence
aatgcagaaccag

SEQ ID NO: 771 - DNA, 13 bp, Artificial Sequence
  synthetic sequence
ccaacagcaggaa

SEQ ID NO: 772 - DNA, 13 bp, Artificial Sequence
  synthetic sequence
gggtaatagaccc

SEQ ID NO: 773 - DNA, 13 bp, Artificial Sequence
  synthetic sequence
agactaaaaatgg

SEQ ID NO: 774 - DNA, 13 bp, Artificial Sequence
  synthetic sequence
tgaacatgacatc

SEQ ID NO: 775 - DNA, 13 bp, Artificial Sequence
  synthetic sequence
atgtgtcacgcca

SEQ ID NO: 776 - DNA, 13 bp, Artificial Sequence
  synthetic sequence
aagaaagagaaat

SEQ ID NO: 777 - DNA, 13 bp, Artificial Sequence
  synthetic sequence
ggttcgtcgagag

SEQ ID NO: 778 - DNA, 13 bp, Artificial Sequence
  synthetic sequence
tggcatccgtgga

SEQ ID NO: 779 - DNA, 13 bp, Artificial Sequence
  synthetic sequence
tatcaaaacaagg

SEQ ID NO: 780 - DNA, 13 bp, Artificial Sequence
  synthetic sequence
tggttcgtggaga

SEQ ID NO: 781 - DNA, 13 bp, Artificial Sequence
  synthetic sequence
atttccctgacag

SEQ ID NO: 782 - DNA, 13 bp, Artificial Sequence
  synthetic sequence
aaaccaaccttgg

SEQ ID NO: 783 - DNA, 13 bp, Artificial Sequence
  synthetic sequence
tatcaaaacaaag

SEQ ID NO: 784 - DNA, 13 bp, Artificial Sequence
  synthetic sequence
atggcgtcgaaag

SEQ ID NO: 785 - DNA, 13 bp, Artificial Sequence
  synthetic sequence
tcctttcccaaag

SEQ ID NO: 786 - DNA, 13 bp, Artificial Sequence
  synthetic sequence
tcatagccatcct

SEQ ID NO: 787 - DNA, 13 bp, Artificial Sequence
  synthetic sequence
tgacgacgatggc

SEQ ID NO: 788 - DNA, 13 bp, Artificial Sequence
  synthetic sequence
ttgcaatagattt

SEQ ID NO: 789 - DNA, 13 bp, Artificial Sequence
  synthetic sequence
aatttgaagccct

SEQ ID NO: 790 - DNA, 13 bp, Artificial Sequence
  synthetic sequence
accaggcagtggt

SEQ ID NO: 791 - DNA, 13 bp, Artificial Sequence
  synthetic sequence
tgcactctcattg

SEQ ID NO: 792 - DNA, 13 bp, Artificial Sequence
  synthetic sequence
aacgcagaaccag

SEQ ID NO: 793 - DNA, 13 bp, Artificial Sequence
  synthetic sequence
gacatctcaagtg

SEQ ID NO: 794 - DNA, 13 bp, Artificial Sequence
  synthetic sequence
tggaacagagtgt

SEQ ID NO: 795 - DNA, 13 bp, Artificial Sequence
  synthetic sequence
tcataggagcaga

SEQ ID NO: 796 - DNA, 13 bp, Artificial Sequence
  synthetic sequence
acaatccagagat

SEQ ID NO: 797 - DNA, 13 bp, Artificial Sequence
  synthetic sequence
acgtcccttcacc

SEQ ID NO: 798 - DNA, 13 bp, Artificial Sequence
  synthetic sequence
ggagctacttggc

SEQ ID NO: 799 - DNA, 13 bp, Artificial Sequence
  synthetic sequence
gttatcaagaatg

SEQ ID NO: 800 - DNA, 13 bp, Artificial Sequence
  synthetic sequence
gttccatgtagaa

SEQ ID NO: 801 - DNA, 13 bp, Artificial Sequence
  synthetic sequence
acgtgtgctaagt

SEQ ID NO: 802 - DNA, 13 bp, Artificial Sequence
  synthetic sequence
ccatggtgaacgg

SEQ ID NO: 803 - DNA, 13 bp, Artificial Sequence
  synthetic sequence
accaagccacagt

SEQ ID NO: 804 - DNA, 13 bp, Artificial Sequence
  synthetic sequence
tgaacaggttcac

SEQ ID NO: 805 - DNA, 13 bp, Artificial Sequence
  synthetic sequence
gaaaggtcatgga

SEQ ID NO: 806 - DNA, 13 bp, Artificial Sequence
  synthetic sequence
gagagctcaaaaa

SEQ ID NO: 807 - DNA, 13 bp, Artificial Sequence
  synthetic sequence
tggccatgacaac

SEQ ID NO: 808 - DNA, 13 bp, Artificial Sequence
  synthetic sequence
tggactagagagg

SEQ ID NO: 809 - DNA, 13 bp, Artificial Sequence
  synthetic sequence
tagaaccaatatc

SEQ ID NO: 810 - DNA, 13 bp, Artificial Sequence
  synthetic sequence
gaaataacagcac

SEQ ID NO: 811 - DNA, 13 bp, Artificial Sequence
  synthetic sequence
atagaggaaggaa

SEQ ID NO: 812 - DNA, 13 bp, Artificial Sequence
  synthetic sequence
tgacatgtgcgaa

SEQ ID NO: 813 - DNA, 13 bp, Artificial Sequence
  synthetic sequence
ggagagtgataga

SEQ ID NO: 814 - DNA, 13 bp, Artificial Sequence
  synthetic sequence
attatcccagccc

SEQ ID NO: 815 - DNA, 13 bp, Artificial Sequence
  synthetic sequence
gagaaatggctga

SEQ ID NO: 816 - DNA, 13 bp, Artificial Sequence
  synthetic sequence
ctcataaagaatg

SEQ ID NO: 817 - DNA, 13 bp, Artificial Sequence
  synthetic sequence
tgtcactagagaa

SEQ ID NO: 818 - DNA, 13 bp, Artificial Sequence
  synthetic sequence
acaagacaatcaa

SEQ ID NO: 819 - DNA, 13 bp, Artificial Sequence
  synthetic sequence
agccagattatga

SEQ ID NO: 820 - DNA, 13 bp, Artificial Sequence
  synthetic sequence
aagggatcattcc

SEQ ID NO: 821 - DNA, 13 bp, Artificial Sequence
  synthetic sequence
ctcatagccatgg

SEQ ID NO: 822 - DNA, 13 bp, Artificial Sequence
  synthetic sequence
ccatctttgagga

SEQ ID NO: 823 - DNA, 13 bp, Artificial Sequence
  synthetic sequence
tggcttccggtgc

SEQ ID NO: 824 - DNA, 13 bp, Artificial Sequence
  synthetic sequence
tcatgcttgtagc

SEQ ID NO: 825 - DNA, 13 bp, Artificial Sequence
  synthetic sequence
gggacaaagaaga

SEQ ID NO: 826 - DNA, 13 bp, Artificial Sequence
  synthetic sequence
tggaagaatgctt

SEQ ID NO: 827 - DNA, 13 bp, Artificial Sequence
  synthetic sequence
ccagagtccccag

SEQ ID NO: 828 - DNA, 13 bp, Artificial Sequence
  synthetic sequence
gagtctcatggat

SEQ ID NO: 829 - DNA, 13 bp, Artificial Sequence
  synthetic sequence
ccagagacacaga

SEQ ID NO: 830 - DNA, 13 bp, Artificial Sequence
  synthetic sequence
caaaagggaaagt

SEQ ID NO: 831 - DNA, 13 bp, Artificial Sequence
  synthetic sequence
gaattagaacccc

SEQ ID NO: 832 - DNA, 13 bp, Artificial Sequence
  synthetic sequence
aaagcaaaaatct

SEQ ID NO: 833 - DNA, 13 bp, Artificial Sequence
  synthetic sequence
ggcaaagcgaaaa

SEQ ID NO: 834 - DNA, 13 bp, Artificial Sequence
  synthetic sequence
gccctccagaagt

SEQ ID NO: 835 - DNA, 13 bp, Artificial Sequence
  synthetic sequence
tggcttggagcac

SEQ ID NO: 836 - DNA, 13 bp, Artificial Sequence
  synthetic sequence
tacaaagagtgga

SEQ ID NO: 837 - DNA, 13 bp, Artificial Sequence
  synthetic sequence
gtgattgacctag

SEQ ID NO: 838 - DNA, 13 bp, Artificial Sequence
  synthetic sequence
tgctgcagatgga

SEQ ID NO: 839 - DNA, 13 bp, Artificial Sequence
  synthetic sequence
ccaaccaggcagc

SEQ ID NO: 840 - DNA, 13 bp, Artificial Sequence
  synthetic sequence
gaaggggcttgga

SEQ ID NO: 841 - DNA, 13 bp, Artificial Sequence
  synthetic sequence
caaagatcaggag

SEQ ID NO: 842 - DNA, 13 bp, Artificial Sequence
  synthetic sequence
tggaacacgggag

SEQ ID NO: 843 - DNA, 13 bp, Artificial Sequence
  synthetic sequence
cgttgatgctcct

SEQ ID NO: 844 - DNA, 13 bp, Artificial Sequence
  synthetic sequence
gacgtaagatggg

SEQ ID NO: 845 - DNA, 13 bp, Artificial Sequence
  synthetic sequence
agctgacctatca

SEQ ID NO: 846 - DNA, 13 bp, Artificial Sequence
  synthetic sequence
ggagtctcttggg

SEQ ID NO: 847 - DNA, 13 bp, Artificial Sequence
  synthetic sequence
gtctggaataggg

SEQ ID NO: 848 - DNA, 13 bp, Artificial Sequence
  synthetic sequence
ggaattaatgatg

SEQ ID NO: 849 - DNA, 13 bp, Artificial Sequence
  synthetic sequence
gaaaggcgaaaat

SEQ ID NO: 850 - DNA, 13 bp, Artificial Sequence
  synthetic sequence
tcaagccatcagg

SEQ ID NO: 851 - DNA, 13 bp, Artificial Sequence
  synthetic sequence
cacaagggaagaa

SEQ ID NO: 852 - DNA, 13 bp, Artificial Sequence
  synthetic sequence
ggacaaaagaggg

SEQ ID NO: 853 - DNA, 13 bp, Artificial Sequence
  synthetic sequence
caatcatggatga

SEQ ID NO: 854 - DNA, 13 bp, Artificial Sequence
  synthetic sequence
tagaagaaggaag

SEQ ID NO: 855 - DNA, 13 bp, Artificial Sequence
  synthetic sequence
aggtctcctggga

SEQ ID NO: 856 - DNA, 13 bp, Artificial Sequence
  synthetic sequence
tggacattgaact

SEQ ID NO: 857 - DNA, 13 bp, Artificial Sequence
  synthetic sequence
tggaaaaacatgg

SEQ ID NO: 858 - DNA, 13 bp, Artificial Sequence
  synthetic sequence
gtgataggcatac

SEQ ID NO: 859 - DNA, 13 bp, Artificial Sequence
  synthetic sequence
atgtgccatgcca

SEQ ID NO: 860 - DNA, 13 bp, Artificial Sequence
  synthetic sequence
gaagaaatgctca

SEQ ID NO: 861 - DNA, 13 bp, Artificial Sequence
  synthetic sequence
gttccatgcagaa

SEQ ID NO: 862 - DNA, 13 bp, Artificial Sequence
  synthetic sequence
gagaccctggaga

SEQ ID NO: 863 - DNA, 13 bp, Artificial Sequence
  synthetic sequence
agattgttgatct

SEQ ID NO: 864 - DNA, 13 bp, Artificial Sequence
  synthetic sequence
agaagttcttctt

SEQ ID NO: 865 - DNA, 13 bp, Artificial Sequence
  synthetic sequence
gagaagcaatgca

SEQ ID NO: 866 - DNA, 13 bp, Artificial Sequence
  synthetic sequence
aaaaagcagcaga

SEQ ID NO: 867 - DNA, 13 bp, Artificial Sequence
  synthetic sequence
ttgaggcagaacc

SEQ ID NO: 868 - DNA, 13 bp, Artificial Sequence
  synthetic sequence
cctgtgctatgtt

SEQ ID NO: 869 - DNA, 13 bp, Artificial Sequence
  synthetic sequence
aggtcaaacgcag

SEQ ID NO: 870 - DNA, 13 bp, Artificial Sequence
  synthetic sequence
atagagcttcaga

SEQ ID NO: 871 - DNA, 13 bp, Artificial Sequence
  synthetic sequence
taccaaaataagg

SEQ ID NO: 872 - DNA, 13 bp, Artificial Sequence
  synthetic sequence
ctgactccccaaa

SEQ ID NO: 873 - DNA, 13 bp, Artificial Sequence
  synthetic sequence
ggggtctcatgga

SEQ ID NO: 874 - DNA, 13 bp, Artificial Sequence
  synthetic sequence
tggtttgtggaaa

SEQ ID NO: 875 - DNA, 13 bp, Artificial Sequence
  synthetic sequence
agttctaacagtt

SEQ ID NO: 876 - DNA, 13 bp, Artificial Sequence
  synthetic sequence
cagctctctttga

SEQ ID NO: 877 - DNA, 13 bp, Artificial Sequence
  synthetic sequence
ggacacttgaaat

SEQ ID NO: 878 - DNA, 13 bp, Artificial Sequence
  synthetic sequence
gttgtcaagaatg

SEQ ID NO: 879 - DNA, 13 bp, Artificial Sequence
  synthetic sequence
cacaatggcaaaa

SEQ ID NO: 880 - DNA, 13 bp, Artificial Sequence
  synthetic sequence
gcttcagctatcc

SEQ ID NO: 881 - DNA, 13 bp, Artificial Sequence
  synthetic sequence
tctttaagaacaa

SEQ ID NO: 882 - DNA, 13 bp, Artificial Sequence
  synthetic sequence
aaagcatggatgg

SEQ ID NO: 883 - DNA, 13 bp, Artificial Sequence
  synthetic sequence
gaactagagagag

SEQ ID NO: 884 - DNA, 13 bp, Artificial Sequence
  synthetic sequence
gaagaagtgatga

SEQ ID NO: 885 - DNA, 13 bp, Artificial Sequence
  synthetic sequence
tgtgtactctcat

SEQ ID NO: 886 - DNA, 13 bp, Artificial Sequence
  synthetic sequence
gaaccagagcgtg

SEQ ID NO: 887 - DNA, 13 bp, Artificial Sequence
  synthetic sequence
tagagttcgaagc

SEQ ID NO: 888 - DNA, 13 bp, Artificial Sequence
  synthetic sequence
ttgttattcatga

SEQ ID NO: 889 - DNA, 13 bp, Artificial Sequence
  synthetic sequence
tggtgagagctac

SEQ ID NO: 890 - DNA, 13 bp, Artificial Sequence
  synthetic sequence
tggataccattag

SEQ ID NO: 891 - DNA, 13 bp, Artificial Sequence
  synthetic sequence
aatgatacatgga

SEQ ID NO: 892 - DNA, 13 bp, Artificial Sequence
  synthetic sequence
tgaaggcgcttgg

SEQ ID NO: 893 - DNA, 13 bp, Artificial Sequence
  synthetic sequence
ttggatcctgtgg

SEQ ID NO: 894 - DNA, 13 bp, Artificial Sequence
  synthetic sequence
cctggaagctggc

SEQ ID NO: 895 - DNA, 13 bp, Artificial Sequence
  synthetic sequence
atccatggatgga

SEQ ID NO: 896 - DNA, 13 bp, Artificial Sequence
  synthetic sequence
gatttatcattgg

SEQ ID NO: 897 - DNA, 13 bp, Artificial Sequence
  synthetic sequence
gcagacctcagga

SEQ ID NO: 898 - DNA, 13 bp, Artificial Sequence
  synthetic sequence
caacgggctggag

SEQ ID NO: 899 - DNA, 13 bp, Artificial Sequence
  synthetic sequence
gtggtgataggtc

SEQ ID NO: 900 - DNA, 13 bp, Artificial Sequence
  synthetic sequence
acagtgctaatgg

SEQ ID NO: 901 - DNA, 13 bp, Artificial Sequence
  synthetic sequence
agatggacaaatt

SEQ ID NO: 902 - DNA, 13 bp, Artificial Sequence
  synthetic sequence
tggattttgaact

SEQ ID NO: 903 - DNA, 13 bp, Artificial Sequence
  synthetic sequence
agcacacaggaag

SEQ ID NO: 904 - DNA, 13 bp, Artificial Sequence
  synthetic sequence
tggatttgggaga

SEQ ID NO: 905 - DNA, 13 bp, Artificial Sequence
  synthetic sequence
tcttcgagcatga

SEQ ID NO: 906 - DNA, 13 bp, Artificial Sequence
  synthetic sequence
gctatattgatgg

SEQ ID NO: 907 - DNA, 13 bp, Artificial Sequence
  synthetic sequence
gccattgccaacc

SEQ ID NO: 908 - DNA, 13 bp, Artificial Sequence
  synthetic sequence
gaaggggcctgga

SEQ ID NO: 909 - DNA, 13 bp, Artificial Sequence
  synthetic sequence
ttccgggccgaca

SEQ ID NO: 910 - DNA, 13 bp, Artificial Sequence
  synthetic sequence
atgtcaaatggga

SEQ ID NO: 911 - DNA, 13 bp, Artificial Sequence
  synthetic sequence
gaaagccaaaaga

SEQ ID NO: 912 - DNA, 13 bp, Artificial Sequence
  synthetic sequence
atggcaacaacgc

SEQ ID NO: 913 - DNA, 13 bp, Artificial Sequence
  synthetic sequence
ccaccttcatcat

SEQ ID NO: 914 - DNA, 13 bp, Artificial Sequence
  synthetic sequence
atctggacgaaag

SEQ ID NO: 915 - DNA, 13 bp, Artificial Sequence
  synthetic sequence
ttgtgaaaccaga

SEQ ID NO: 916 - DNA, 13 bp, Artificial Sequence
  synthetic sequence
gtgccatgccgca

SEQ ID NO: 917 - DNA, 13 bp, Artificial Sequence
  synthetic sequence
tgagaggaaaatt

SEQ ID NO: 918 - DNA, 13 bp, Artificial Sequence
  synthetic sequence
ttttctatcatga

SEQ ID NO: 919 - DNA, 13 bp, Artificial Sequence
  synthetic sequence
tagagacactgct

SEQ ID NO: 920 - DNA, 13 bp, Artificial Sequence
  synthetic sequence
acaagagaagagt

SEQ ID NO: 921 - DNA, 13 bp, Artificial Sequence
  synthetic sequence
gtcccatgcagaa

SEQ ID NO: 922 - DNA, 13 bp, Artificial Sequence
  synthetic sequence
catggaactcagg

SEQ ID NO: 923 - DNA, 13 bp, Artificial Sequence
  synthetic sequence
caccaaatcccac

SEQ ID NO: 924 - DNA, 13 bp, Artificial Sequence
  synthetic sequence
cttgagttcgaag

SEQ ID NO: 925 - DNA, 13 bp, Artificial Sequence
  synthetic sequence
attgccatggacc

SEQ ID NO: 926 - DNA, 13 bp, Artificial Sequence
  synthetic sequence
gtggaaatcgagg

SEQ ID NO: 927 - DNA, 13 bp, Artificial Sequence
  synthetic sequence
tgtacagaactgg

SEQ ID NO: 928 - DNA, 13 bp, Artificial Sequence
  synthetic sequence
taccaaaataaag

SEQ ID NO: 929 - DNA, 13 bp, Artificial Sequence
  synthetic sequence
acaaacaatggtt

SEQ ID NO: 930 - DNA, 13 bp, Artificial Sequence
  synthetic sequence
caacagcaggagt

SEQ ID NO: 931 - DNA, 13 bp, Artificial Sequence
  synthetic sequence
cacctgaaatgca

SEQ ID NO: 932 - DNA, 13 bp, Artificial Sequence
  synthetic sequence
acatgatttcaag

SEQ ID NO: 933 - DNA, 13 bp, Artificial Sequence
  synthetic sequence
ttcagcggtgttt

SEQ ID NO: 934 - DNA, 13 bp, Artificial Sequence
  synthetic sequence
tgacctacgttgt

SEQ ID NO: 935 - DNA, 13 bp, Artificial Sequence
  synthetic sequence
aaggagaatggaa

SEQ ID NO: 936 - DNA, 13 bp, Artificial Sequence
  synthetic sequence
ctaaagcatcaca

SEQ ID NO: 937 - DNA, 13 bp, Artificial Sequence
  synthetic sequence
tcatggaattcag

SEQ ID NO: 938 - DNA, 13 bp, Artificial Sequence
  synthetic sequence
acacaacatcaaa

SEQ ID NO: 939 - DNA, 13 bp, Artificial Sequence
  synthetic sequence
atggagaaattga

SEQ ID NO: 940 - DNA, 13 bp, Artificial Sequence
  synthetic sequence
taaacatgacatc

SEQ ID NO: 941 - DNA, 13 bp, Artificial Sequence
  synthetic sequence
aatggttggaaac

SEQ ID NO: 942 - DNA, 13 bp, Artificial Sequence
  synthetic sequence
aaaagatggggaa

SEQ ID NO: 943 - DNA, 13 bp, Artificial Sequence
  synthetic sequence
ggctgaaaagaat

SEQ ID NO: 944 - DNA, 13 bp, Artificial Sequence
  synthetic sequence
cagatggattgtt

SEQ ID NO: 945 - DNA, 13 bp, Artificial Sequence
  synthetic sequence
gatctctgatgaa

SEQ ID NO: 946 - DNA, 13 bp, Artificial Sequence
  synthetic sequence
gtcatcacagaaa

SEQ ID NO: 947 - DNA, 13 bp, Artificial Sequence
  synthetic sequence
atagaccccagac

SEQ ID NO: 948 - DNA, 13 bp, Artificial Sequence
  synthetic sequence
tggcgacagccat

SEQ ID NO: 949 - DNA, 13 bp, Artificial Sequence
  synthetic sequence
gaaaagccaaaat

SEQ ID NO: 950 - DNA, 13 bp, Artificial Sequence
  synthetic sequence
gagactctggaga

SEQ ID NO: 951 - DNA, 13 bp, Artificial Sequence
  synthetic sequence
tgactgaggactg

SEQ ID NO: 952 - DNA, 13 bp, Artificial Sequence
  synthetic sequence
ggaggaactacca

SEQ ID NO: 953 - DNA, 13 bp, Artificial Sequence
  synthetic sequence
gaaggagcctgga

SEQ ID NO: 954 - DNA, 13 bp, Artificial Sequence
  synthetic sequence
tgttaggagttgg

SEQ ID NO: 955 - DNA, 13 bp, Artificial Sequence
  synthetic sequence
tttggtccggaaa

SEQ ID NO: 956 - DNA, 13 bp, Artificial Sequence
  synthetic sequence
aatatgctgaaac

SEQ ID NO: 957 - DNA, 13 bp, Artificial Sequence
  synthetic sequence
atatttaagctca

SEQ ID NO: 958 - DNA, 13 bp, Artificial Sequence
  synthetic sequence
ggaaaggcaaaaa

SEQ ID NO: 959 - DNA, 13 bp, Artificial Sequence
  synthetic sequence
tggaccctgtggt

SEQ ID NO: 960 - DNA, 13 bp, Artificial Sequence
  synthetic sequence
aaagcaaagatct

SEQ ID NO: 961 - DNA, 13 bp, Artificial Sequence
  synthetic sequence
aatcttcaccaag

SEQ ID NO: 962 - DNA, 13 bp, Artificial Sequence
  synthetic sequence
gagctcgcttcct

SEQ ID NO: 963 - DNA, 13 bp, Artificial Sequence
  synthetic sequence
aatgcccacaaag

SEQ ID NO: 964 - DNA, 13 bp, Artificial Sequence
  synthetic sequence
atagagctccaga

SEQ ID NO: 965 - DNA, 13 bp, Artificial Sequence
  synthetic sequence
ggagacaaatggg

SEQ ID NO: 966 - DNA, 13 bp, Artificial Sequence
  synthetic sequence
ttcagtcaacatg

SEQ ID NO: 967 - DNA, 13 bp, Artificial Sequence
  synthetic sequence
ctatggcttaatc

SEQ ID NO: 968 - DNA, 13 bp, Artificial Sequence
  synthetic sequence
gtttctcctcttt

SEQ ID NO: 969 - DNA, 13 bp, Artificial Sequence
  synthetic sequence
agcatttttgctt

SEQ ID NO: 970 - DNA, 13 bp, Artificial Sequence
  synthetic sequence
ggagtggctgtca

SEQ ID NO: 971 - DNA, 13 bp, Artificial Sequence
  synthetic sequence
tgaatctcttcat

SEQ ID NO: 972 - DNA, 13 bp, Artificial Sequence
  synthetic sequence
tattgctctgtcc

SEQ ID NO: 973 - DNA, 13 bp, Artificial Sequence
  synthetic sequence
tccatgggttgtg

SEQ ID NO: 974 - DNA, 13 bp, Artificial Sequence
  synthetic sequence
ccccagcctctgt

SEQ ID NO: 975 - DNA, 13 bp, Artificial Sequence
  synthetic sequence
ccatgttctcctc

SEQ ID NO: 976 - DNA, 13 bp, Artificial Sequence
  synthetic sequence
tttctggttctgg

SEQ ID NO: 977 - DNA, 13 bp, Artificial Sequence
  synthetic sequence
ccatttctgaaat

SEQ ID NO: 978 - DNA, 13 bp, Artificial Sequence
  synthetic sequence
gttgtcatccatt

SEQ ID NO: 979 - DNA, 13 bp, Artificial Sequence
  synthetic sequence
tttggatttctgt

SEQ ID NO: 980 - DNA, 13 bp, Artificial Sequence
  synthetic sequence
tcgtggtgttcca

SEQ ID NO: 981 - DNA, 13 bp, Artificial Sequence
  synthetic sequence
cccacgttttgta

SEQ ID NO: 982 - DNA, 13 bp, Artificial Sequence
  synthetic sequence
cgtactgtggctt

SEQ ID NO: 983 - DNA, 13 bp, Artificial Sequence
  synthetic sequence
tggtaccttattg

SEQ ID NO: 984 - DNA, 13 bp, Artificial Sequence
  synthetic sequence
tcctagtgaaaag

SEQ ID NO: 985 - DNA, 13 bp, Artificial Sequence
  synthetic sequence
taggcccatgttt

SEQ ID NO: 986 - DNA, 13 bp, Artificial Sequence
  synthetic sequence
atgtaccatattg

SEQ ID NO: 987 - DNA, 13 bp, Artificial Sequence
  synthetic sequence
tctggctctggaa

SEQ ID NO: 988 - DNA, 13 bp, Artificial Sequence
  synthetic sequence
tggcactgacgta

SEQ ID NO: 989 - DNA, 13 bp, Artificial Sequence
  synthetic sequence
caacttccatgtt

SEQ ID NO: 990 - DNA, 13 bp, Artificial Sequence
  synthetic sequence
tctttttctgcca

SEQ ID NO: 991 - DNA, 13 bp, Artificial Sequence
  synthetic sequence
ttcctctttcctg

SEQ ID NO: 992 - DNA, 13 bp, Artificial Sequence
  synthetic sequence
tcattattccggc

SEQ ID NO: 993 - DNA, 13 bp, Artificial Sequence
  synthetic sequence
tcatcatgggagt

SEQ ID NO: 994 - DNA, 13 bp, Artificial Sequence
  synthetic sequence
cctgttccacatg

SEQ ID NO: 995 - DNA, 13 bp, Artificial Sequence
  synthetic sequence
actgccttgctgt

SEQ ID NO: 996 - DNA, 13 bp, Artificial Sequence
  synthetic sequence
ctccatatgagat

SEQ ID NO: 997 - DNA, 13 bp, Artificial Sequence
  synthetic sequence
catgcctccagct

SEQ ID NO: 998 - DNA, 13 bp, Artificial Sequence
  synthetic sequence
atgtctgttgtga

SEQ ID NO: 999 - DNA, 13 bp, Artificial Sequence
  synthetic sequence
ttcctccttgttc

SEQ ID NO: 1000 - DNA, 13 bp, Artificial Sequence
  synthetic sequence
ttttctttgtcag

SEQ ID NO: 1001 - DNA, 13 bp, Artificial Sequence
  synthetic sequence
gtggagtttcgtg

SEQ ID NO: 1002 - DNA, 13 bp, Artificial Sequence
  synthetic sequence
tggatgttagtct

SEQ ID NO: 1003 - DNA, 13 bp, Artificial Sequence
  synthetic sequence
gtgtcacatttct

SEQ ID NO: 1004 - DNA, 13 bp, Artificial Sequence
  synthetic sequence
tcagctggtggaa

SEQ ID NO: 1005 - DNA, 13 bp, Artificial Sequence
  synthetic sequence
agtcccacgtgtg

SEQ ID NO: 1006 - DNA, 13 bp, Artificial Sequence
  synthetic sequence
ccatctttcatga

SEQ ID NO: 1007 - DNA, 13 bp, Artificial Sequence
  synthetic sequence
ccatgatgtcagt

SEQ ID NO: 1008 - DNA, 13 bp, Artificial Sequence
  synthetic sequence
aaccccataacca

SEQ ID NO: 1009 - DNA, 13 bp, Artificial Sequence
  synthetic sequence
tgtcacacttttc

SEQ ID NO: 1010 - DNA, 13 bp, Artificial Sequence
  synthetic sequence
cctgttctaggtg

SEQ ID NO: 1011 - DNA, 13 bp, Artificial Sequence
  synthetic sequence
taccatatggctc

SEQ ID NO: 1012 - DNA, 13 bp, Artificial Sequence
  synthetic sequence
tccaacttgccta

SEQ ID NO: 1013 - DNA, 13 bp, Artificial Sequence
  synthetic sequence
atgacatccatgt

SEQ ID NO: 1014 - DNA, 13 bp, Artificial Sequence
  synthetic sequence
tattgttctgtcc

SEQ ID NO: 1015 - DNA, 13 bp, Artificial Sequence
  synthetic sequence
catctcattgaag

SEQ ID NO: 1016 - DNA, 13 bp, Artificial Sequence
  synthetic sequence
tggtatcttattg

SEQ ID NO: 1017 - DNA, 13 bp, Artificial Sequence
  synthetic sequence
cccatcctctgtc

SEQ ID NO: 1018 - DNA, 13 bp, Artificial Sequence
  synthetic sequence
cctccagccacta

SEQ ID NO: 1019 - DNA, 13 bp, Artificial Sequence
  synthetic sequence
tctggatttctgt

SEQ ID NO: 1020 - DNA, 13 bp, Artificial Sequence
  synthetic sequence
ccatgttttccat

SEQ ID NO: 1021 - DNA, 13 bp, Artificial Sequence
  synthetic sequence
atgcagttccaaa

SEQ ID NO: 1022 - DNA, 13 bp, Artificial Sequence
  synthetic sequence
agtcttcatcatt

SEQ ID NO: 1023 - DNA, 13 bp, Artificial Sequence
  synthetic sequence
agacttttccctt

SEQ ID NO: 1024 - DNA, 13 bp, Artificial Sequence
  synthetic sequence
ccatgtcggcatg

SEQ ID NO: 1025 - DNA, 13 bp, Artificial Sequence
  synthetic sequence
atttggttgttct

SEQ ID NO: 1026 - DNA, 13 bp, Artificial Sequence
  synthetic sequence
ctcaacattggtg

SEQ ID NO: 1027 - DNA, 13 bp, Artificial Sequence
  synthetic sequence
attgacagtacca

SEQ ID NO: 1028 - DNA, 13 bp, Artificial Sequence
  synthetic sequence
gagcatgattgta

SEQ ID NO: 1029 - DNA, 13 bp, Artificial Sequence
  synthetic sequence
gtgtctttttctt

SEQ ID NO: 1030 - DNA, 13 bp, Artificial Sequence
  synthetic sequence
aagtccatctcaa

SEQ ID NO: 1031 - DNA, 13 bp, Artificial Sequence
  synthetic sequence
ggctaaatttggg

SEQ ID NO: 1032 - DNA, 13 bp, Artificial Sequence
  synthetic sequence
ccatagattgctc

SEQ ID NO: 1033 - DNA, 13 bp, Artificial Sequence
  synthetic sequence
cccacaggtacca

SEQ ID NO: 1034 - DNA, 13 bp, Artificial Sequence
  synthetic sequence
ctccactccttgt

SEQ ID NO: 1035 - DNA, 13 bp, Artificial Sequence
  synthetic sequence
cctccatatgata

SEQ ID NO: 1036 - DNA, 13 bp, Artificial Sequence
  synthetic sequence
caaaagttggtct

SEQ ID NO: 1037 - DNA, 13 bp, Artificial Sequence
  synthetic sequence
tgttagccattga

SEQ ID NO: 1038 - DNA, 13 bp, Artificial Sequence
  synthetic sequence
ttcattattccag

SEQ ID NO: 1039 - DNA, 13 bp, Artificial Sequence
  synthetic sequence
gtcatccactgat

SEQ ID NO: 1040 - DNA, 13 bp, Artificial Sequence
  synthetic sequence
ttgtgcaactcac

SEQ ID NO: 1041 - DNA, 13 bp, Artificial Sequence
  synthetic sequence
acccacgtagctc

SEQ ID NO: 1042 - DNA, 13 bp, Artificial Sequence
  synthetic sequence
cctctttcattct

SEQ ID NO: 1043 - DNA, 13 bp, Artificial Sequence
  synthetic sequence
cccagtttggttc

SEQ ID NO: 1044 - DNA, 13 bp, Artificial Sequence
  synthetic sequence
ggtgcaccatttt

SEQ ID NO: 1045 - DNA, 13 bp, Artificial Sequence
  synthetic sequence
ttttcctcattgt

SEQ ID NO: 1046 - DNA, 13 bp, Artificial Sequence
  synthetic sequence
tagcacgctatca

SEQ ID NO: 1047 - DNA, 13 bp, Artificial Sequence
  synthetic sequence
cccattgtgaagt

SEQ ID NO: 1048 - DNA, 13 bp, Artificial Sequence
  synthetic sequence
gacatccaggttt

SEQ ID NO: 1049 - DNA, 13 bp, Artificial Sequence
  synthetic sequence
ctgtccgtggtga

SEQ ID NO: 1050 - DNA, 13 bp, Artificial Sequence
  synthetic sequence
ttttgttccttcc

SEQ ID NO: 1051 - DNA, 13 bp, Artificial Sequence
  synthetic sequence
ttgttccttcaca

SEQ ID NO: 1052 - DNA, 13 bp, Artificial Sequence
  synthetic sequence
gctatctttttct

SEQ ID NO: 1053 - DNA, 13 bp, Artificial Sequence
  synthetic sequence
ccgccatgttctg

SEQ ID NO: 1054 - DNA, 13 bp, Artificial Sequence
  synthetic sequence
gtttgcttttgcc

SEQ ID NO: 1055 - DNA, 13 bp, Artificial Sequence
  synthetic sequence
gttctcgaggtct

SEQ ID NO: 1056 - DNA, 13 bp, Artificial Sequence
  synthetic sequence
gaaactccggcca

SEQ ID NO: 1057 - DNA, 13 bp, Artificial Sequence
  synthetic sequence
aatcccaaagcca

SEQ ID NO: 1058 - DNA, 13 bp, Artificial Sequence
  synthetic sequence
aataacccatatc

SEQ ID NO: 1059 - DNA, 13 bp, Artificial Sequence
  synthetic sequence
tgccaaactctcc

SEQ ID NO: 1060 - DNA, 13 bp, Artificial Sequence
  synthetic sequence
gtaaccactccat

SEQ ID NO: 1061 - DNA, 13 bp, Artificial Sequence
  synthetic sequence
gaccaggttgttc

SEQ ID NO: 1062 - DNA, 13 bp, Artificial Sequence
  synthetic sequence
tcaccactgggtt

SEQ ID NO: 1063 - DNA, 13 bp, Artificial Sequence
  synthetic sequence
ctgtcaggtgctg

SEQ ID NO: 1064 - DNA, 13 bp, Artificial Sequence
  synthetic sequence
tgctctgaggaaa

SEQ ID NO: 1065 - DNA, 13 bp, Artificial Sequence
  synthetic sequence
agcttccatgttc

SEQ ID NO: 1066 - DNA, 13 bp, Artificial Sequence
  synthetic sequence
ctgtgtattcctc

SEQ ID NO: 1067 - DNA, 13 bp, Artificial Sequence
  synthetic sequence
tctcctcttttca

SEQ ID NO: 1068 - DNA, 13 bp, Artificial Sequence
  synthetic sequence
cattggtgttatt

SEQ ID NO: 1069 - DNA, 13 bp, Artificial Sequence
  synthetic sequence
aaatggtgtgaac

SEQ ID NO: 1070 - DNA, 13 bp, Artificial Sequence
  synthetic sequence
caaaaacctggtg

SEQ ID NO: 1071 - DNA, 13 bp, Artificial Sequence
  synthetic sequence
gctgctcttttct

SEQ ID NO: 1072 - DNA, 13 bp, Artificial Sequence
  synthetic sequence
taaatctcttcat

SEQ ID NO: 1073 - DNA, 13 bp, Artificial Sequence
  synthetic sequence
atgtttgccatgg

SEQ ID NO: 1074 - DNA, 13 bp, Artificial Sequence
  synthetic sequence
gccattcccaaga

SEQ ID NO: 1075 - DNA, 13 bp, Artificial Sequence
  synthetic sequence
ctgttgtctgata

SEQ ID NO: 1076 - DNA, 13 bp, Artificial Sequence
  synthetic sequence
ctcctgaccctgc

SEQ ID NO: 1077 - DNA, 13 bp, Artificial Sequence
  synthetic sequence
tatcacacttttc

SEQ ID NO: 1078 - DNA, 13 bp, Artificial Sequence
  synthetic sequence
ccaattcgctggg

SEQ ID NO: 1079 - DNA, 13 bp, Artificial Sequence
  synthetic sequence
ttgctcctgacag

SEQ ID NO: 1080 - DNA, 13 bp, Artificial Sequence
  synthetic sequence
acccagtacatct

SEQ ID NO: 1081 - DNA, 13 bp, Artificial Sequence
  synthetic sequence
ggaaagagagata

SEQ ID NO: 1082 - DNA, 13 bp, Artificial Sequence
  synthetic sequence
ttgctctggggaa

SEQ ID NO: 1083 - DNA, 13 bp, Artificial Sequence
  synthetic sequence
ttacagaactcct

SEQ ID NO: 1084 - DNA, 13 bp, Artificial Sequence
  synthetic sequence
tcaatgctatgtc

SEQ ID NO: 1085 - DNA, 13 bp, Artificial Sequence
  synthetic sequence
cttacctaggtgc

SEQ ID NO: 1086 - DNA, 13 bp, Artificial Sequence
  synthetic sequence
ccgtactatggct

SEQ ID NO: 1087 - DNA, 13 bp, Artificial Sequence
  synthetic sequence
ccttttccaaaca

SEQ ID NO: 1088 - DNA, 13 bp, Artificial Sequence
  synthetic sequence
caattgggttgac

SEQ ID NO: 1089 - DNA, 13 bp, Artificial Sequence
  synthetic sequence
tgataccttattg

SEQ ID NO: 1090 - DNA, 13 bp, Artificial Sequence
  synthetic sequence
ttgtgcagctcac

SEQ ID NO: 1091 - DNA, 13 bp, Artificial Sequence
  synthetic sequence
tttcctgatgaca

SEQ ID NO: 1092 - DNA, 13 bp, Artificial Sequence
  synthetic sequence
ccatccttcataa

SEQ ID NO: 1093 - DNA, 13 bp, Artificial Sequence
  synthetic sequence
cctgttctgggtg

SEQ ID NO: 1094 - DNA, 13 bp, Artificial Sequence
  synthetic sequence
ccatgtcagcatg

SEQ ID NO: 1095 - DNA, 13 bp, Artificial Sequence
  synthetic sequence
tcagctcagtggg

SEQ ID NO: 1096 - DNA, 13 bp, Artificial Sequence
  synthetic sequence
tgttccaaaacct

SEQ ID NO: 1097 - DNA, 13 bp, Artificial Sequence
  synthetic sequence
gtagctcctgtca

SEQ ID NO: 1098 - DNA, 13 bp, Artificial Sequence
  synthetic sequence
ccatggtaagccc

SEQ ID NO: 1099 - DNA, 13 bp, Artificial Sequence
  synthetic sequence
catgatggttcaa

SEQ ID NO: 1100 - DNA, 13 bp, Artificial Sequence
  synthetic sequence
tctgtggaaaggc

SEQ ID NO: 1101 - DNA, 13 bp, Artificial Sequence
  synthetic sequence
acccaatacatct

SEQ ID NO: 1102 - DNA, 13 bp, Artificial Sequence
  synthetic sequence
gcagctgtccttt

SEQ ID NO: 1103 - DNA, 13 bp, Artificial Sequence
  synthetic sequence
gcactcacatatg

SEQ ID NO: 1104 - DNA, 13 bp, Artificial Sequence
  synthetic sequence
cttctgtccagtg

SEQ ID NO: 1105 - DNA, 13 bp, Artificial Sequence
  synthetic sequence
tactgttctgtcc

SEQ ID NO: 1106 - DNA, 13 bp, Artificial Sequence
  synthetic sequence
cgatttcttctgt

SEQ ID NO: 1107 - DNA, 13 bp, Artificial Sequence
  synthetic sequence
tgtgtctcagcat

SEQ ID NO: 1108 - DNA, 13 bp, Artificial Sequence
  synthetic sequence
gacatccacgttt

SEQ ID NO: 1109 - DNA, 13 bp, Artificial Sequence
  synthetic sequence
tcttaaacaagag

SEQ ID NO: 1110 - DNA, 13 bp, Artificial Sequence
  synthetic sequence
tgaagatcatcct

SEQ ID NO: 1111 - DNA, 13 bp, Artificial Sequence
  synthetic sequence
atgatatcatgtc

SEQ ID NO: 1112 - DNA, 13 bp, Artificial Sequence
  synthetic sequence
gctggatgctttt

SEQ ID NO: 1113 - DNA, 13 bp, Artificial Sequence
  synthetic sequence
gaatgagtgtgac

SEQ ID NO: 1114 - DNA, 13 bp, Artificial Sequence
  synthetic sequence
ccatttcagatat

SEQ ID NO: 1115 - DNA, 13 bp, Artificial Sequence
  synthetic sequence
cctcctgccacca

SEQ ID NO: 1116 - DNA, 13 bp, Artificial Sequence
  synthetic sequence
tttctgttgtgtg

SEQ ID NO: 1117 - DNA, 13 bp, Artificial Sequence
  synthetic sequence
cctccatgttcta

SEQ ID NO: 1118 - DNA, 13 bp, Artificial Sequence
  synthetic sequence
ttccatgaatatt

SEQ ID NO: 1119 - DNA, 13 bp, Artificial Sequence
  synthetic sequence
aggttctgtatgg

SEQ ID NO: 1120 - DNA, 13 bp, Artificial Sequence
  synthetic sequence
gttttcacttgcc

SEQ ID NO: 1121 - DNA, 13 bp, Artificial Sequence
  synthetic sequence
ctgttgttccggg

SEQ ID NO: 1122 - DNA, 13 bp, Artificial Sequence
  synthetic sequence
cttctgtggctcc

SEQ ID NO: 1123 - DNA, 13 bp, Artificial Sequence
  synthetic sequence
tgggtttgtagaa

SEQ ID NO: 1124 - DNA, 13 bp, Artificial Sequence
  synthetic sequence
taacggattggca

SEQ ID NO: 1125 - DNA, 13 bp, Artificial Sequence
  synthetic sequence
tgtatcttttcat

SEQ ID NO: 1126 - DNA, 13 bp, Artificial Sequence
  synthetic sequence
actccatttccat

SEQ ID NO: 1127 - DNA, 13 bp, Artificial Sequence
  synthetic sequence
ccattgacactgc

SEQ ID NO: 1128 - DNA, 13 bp, Artificial Sequence
  synthetic sequence
gtgtgatgactcc

SEQ ID NO: 1129 - DNA, 13 bp, Artificial Sequence
  synthetic sequence
ttgaccatgttgt

SEQ ID NO: 1130 - DNA, 13 bp, Artificial Sequence
  synthetic sequence
atcctggtgacat

SEQ ID NO: 1131 - DNA, 13 bp, Artificial Sequence
  synthetic sequence
attctgggttttt

SEQ ID NO: 1132 - DNA, 13 bp, Artificial Sequence
  synthetic sequence
acagtctgggatt

SEQ ID NO: 1133 - DNA, 13 bp, Artificial Sequence
  synthetic sequence
agagtagtccagc

SEQ ID NO: 1134 - DNA, 13 bp, Artificial Sequence
  synthetic sequence
gcctttcctatag

SEQ ID NO: 1135 - DNA, 13 bp, Artificial Sequence
  synthetic sequence
cccatagaaaaag

SEQ ID NO: 1136 - DNA, 13 bp, Artificial Sequence
  synthetic sequence
catgcttgatttt

SEQ ID NO: 1137 - DNA, 13 bp, Artificial Sequence
  synthetic sequence
acattggtctcat

SEQ ID NO: 1138 - DNA, 13 bp, Artificial Sequence
  synthetic sequence
cctagttctttcc

SEQ ID NO: 1139 - DNA, 13 bp, Artificial Sequence
  synthetic sequence
tctcagccaaagg

SEQ ID NO: 1140 - DNA, 13 bp, Artificial Sequence
  synthetic sequence
gccatctgttccg

SEQ ID NO: 1141 - DNA, 13 bp, Artificial Sequence
  synthetic sequence
catagccattgtc

SEQ ID NO: 1142 - DNA, 13 bp, Artificial Sequence
  synthetic sequence
catctcattaaag

SEQ ID NO: 1143 - DNA, 13 bp, Artificial Sequence
  synthetic sequence
gggtatcacattt

SEQ ID NO: 1144 - DNA, 13 bp, Artificial Sequence
  synthetic sequence
attgttgtcgttc

SEQ ID NO: 1145 - DNA, 13 bp, Artificial Sequence
  synthetic sequence
ccgtgattggtat

SEQ ID NO: 1146 - DNA, 13 bp, Artificial Sequence
  synthetic sequence
aaaagattccctc

SEQ ID NO: 1147 - DNA, 13 bp, Artificial Sequence
  synthetic sequence
gtctataggcttt

SEQ ID NO: 1148 - DNA, 13 bp, Artificial Sequence
  synthetic sequence
cccatgtcggcgt

SEQ ID NO: 1149 - DNA, 13 bp, Artificial Sequence
  synthetic sequence
tgtcacacttctc

SEQ ID NO: 1150 - DNA, 13 bp, Artificial Sequence
  synthetic sequence
ctgtgatcagtct

SEQ ID NO: 1151 - DNA, 13 bp, Artificial Sequence
  synthetic sequence
cagccgtatgcag

SEQ ID NO: 1152 - DNA, 13 bp, Artificial Sequence
  synthetic sequence
acataacatgcta

SEQ ID NO: 1153 - DNA, 13 bp, Artificial Sequence
  synthetic sequence
gacatccatgttt

SEQ ID NO: 1154 - DNA, 13 bp, Artificial Sequence
  synthetic sequence
actccattgccat

SEQ ID NO: 1155 - DNA, 13 bp, Artificial Sequence
  synthetic sequence
cttacctagatgc

SEQ ID NO: 1156 - DNA, 13 bp, Artificial Sequence
  synthetic sequence
ccatttcggagat

SEQ ID NO: 1157 - DNA, 13 bp, Artificial Sequence
  synthetic sequence
ttggctgttatca

SEQ ID NO: 1158 - DNA, 13 bp, Artificial Sequence
  synthetic sequence
ccccagcctctat

SEQ ID NO: 1159 - DNA, 13 bp, Artificial Sequence
  synthetic sequence
gttcctctcgaca

SEQ ID NO: 1160 - DNA, 13 bp, Artificial Sequence
  synthetic sequence
tcctctaaaattt

SEQ ID NO: 1161 - DNA, 13 bp, Artificial Sequence
  synthetic sequence
ttcttcacttccc

SEQ ID NO: 1162 - DNA, 13 bp, Artificial Sequence
  synthetic sequence
cacttcccctgac

SEQ ID NO: 1163 - DNA, 13 bp, Artificial Sequence
  synthetic sequence
ccaagaatggctg

SEQ ID NO: 1164 - DNA, 13 bp, Artificial Sequence
  synthetic sequence
attgctcggcttc

SEQ ID NO: 1165 - DNA, 13 bp, Artificial Sequence
  synthetic sequence
gtcgtcatccatt

SEQ ID NO: 1166 - DNA, 13 bp, Artificial Sequence
  synthetic sequence
tggtttgttacca

SEQ ID NO: 1167 - DNA, 13 bp, Artificial Sequence
  synthetic sequence
acttccacatttt

SEQ ID NO: 1168 - DNA, 13 bp, Artificial Sequence
  synthetic sequence
ttttgacactggc

SEQ ID NO: 1169 - DNA, 13 bp, Artificial Sequence
  synthetic sequence
ggcctaatcattt

SEQ ID NO: 1170 - DNA, 13 bp, Artificial Sequence
  synthetic sequence
cggctctgttgtc

SEQ ID NO: 1171 - DNA, 13 bp, Artificial Sequence
  synthetic sequence
gggtggctgttct

SEQ ID NO: 1172 - DNA, 13 bp, Artificial Sequence
  synthetic sequence
gcctttgacagca

SEQ ID NO: 1173 - DNA, 13 bp, Artificial Sequence
  synthetic sequence
caaaaatctggtg

SEQ ID NO: 1174 - DNA, 13 bp, Artificial Sequence
  synthetic sequence
caaattcttggtt

SEQ ID NO: 1175 - DNA, 13 bp, Artificial Sequence
  synthetic sequence
aacagaaggcttt

SEQ ID NO: 1176 - DNA, 13 bp, Artificial Sequence
  synthetic sequence
aagtggtgggagc

SEQ ID NO: 1177 - DNA, 13 bp, Artificial Sequence
  synthetic sequence
agcagcaccatca

SEQ ID NO: 1178 - DNA, 13 bp, Artificial Sequence
  synthetic sequence
tatgggtggtctt

SEQ ID NO: 1179 - DNA, 13 bp, Artificial Sequence
  synthetic sequence
agtacatttcatg

SEQ ID NO: 1180 - DNA, 13 bp, Artificial Sequence
  synthetic sequence
accacgaaatccc

SEQ ID NO: 1181 - DNA, 13 bp, Artificial Sequence
  synthetic sequence
gcgggtatggagt

SEQ ID NO: 1182 - DNA, 13 bp, Artificial Sequence
  synthetic sequence
ctgtaatcaggcg

SEQ ID NO: 1183 - DNA, 13 bp, Artificial Sequence
  synthetic sequence
caaaatccagttc

SEQ ID NO: 1184 - DNA, 13 bp, Artificial Sequence
  synthetic sequence
gcttctgtccaat

SEQ ID NO: 1185 - DNA, 13 bp, Artificial Sequence
  synthetic sequence
tctgacgtgtgca

SEQ ID NO: 1186 - DNA, 13 bp, Artificial Sequence
  synthetic sequence
tgcaaaggttggt

SEQ ID NO: 1187 - DNA, 13 bp, Artificial Sequence
  synthetic sequence
ttatctaggagca

SEQ ID NO: 1188 - DNA, 13 bp, Artificial Sequence
  synthetic sequence
ctctgggggaagg

SEQ ID NO: 1189 - DNA, 13 bp, Artificial Sequence
  synthetic sequence
taagcaacaccat

SEQ ID NO: 1190 - DNA, 13 bp, Artificial Sequence
  synthetic sequence
tctgaaggtcatc

SEQ ID NO: 1191 - DNA, 13 bp, Artificial Sequence
  synthetic sequence
tggtattccagaa

SEQ ID NO: 1192 - DNA, 13 bp, Artificial Sequence
  synthetic sequence
ccagtcccatgcc

SEQ ID NO: 1193 - DNA, 13 bp, Artificial Sequence
  synthetic sequence
ttccaaataatcc

SEQ ID NO: 1194 - DNA, 13 bp, Artificial Sequence
  synthetic sequence
ccccaacctctgt

SEQ ID NO: 1195 - DNA, 13 bp, Artificial Sequence
  synthetic sequence
tcatttcattgaa

SEQ ID NO: 1196 - DNA, 13 bp, Artificial Sequence
  synthetic sequence
cccagggttctcc

SEQ ID NO: 1197 - DNA, 13 bp, Artificial Sequence
  synthetic sequence
ttttcttccagta

SEQ ID NO: 1198 - DNA, 13 bp, Artificial Sequence
  synthetic sequence
aagtggtgtgaac

SEQ ID NO: 1199 - DNA, 13 bp, Artificial Sequence
  synthetic sequence
tctgtggctcctg

SEQ ID NO: 1200 - DNA, 13 bp, Artificial Sequence
  synthetic sequence
cagccgtgtgcag

SEQ ID NO: 1201 - DNA, 13 bp, Artificial Sequence
  synthetic sequence
aatagttgaagtc

SEQ ID NO: 1202 - DNA, 13 bp, Artificial Sequence
  synthetic sequence
ctcagcaaaaggg

SEQ ID NO: 1203 - DNA, 13 bp, Artificial Sequence
  synthetic sequence
tgtcacatttttc

SEQ ID NO: 1204 - DNA, 13 bp, Artificial Sequence
  synthetic sequence
aaaagattccttc

SEQ ID NO: 1205 - DNA, 13 bp, Artificial Sequence
  synthetic sequence
gtcaggcacaaca

SEQ ID NO: 1206 - DNA, 13 bp, Artificial Sequence
  synthetic sequence
aaacagctatcgt

SEQ ID NO: 1207 - DNA, 13 bp, Artificial Sequence
  synthetic sequence
tgtgttatttctc

SEQ ID NO: 1208 - DNA, 13 bp, Artificial Sequence
  synthetic sequence
cagtgagcacgta

SEQ ID NO: 1209 - DNA, 13 bp, Artificial Sequence
  synthetic sequence
ctcatatgatcca

SEQ ID NO: 1210 - DNA, 13 bp, Artificial Sequence
  synthetic sequence
agtcccaatcatt

SEQ ID NO: 1211 - DNA, 13 bp, Artificial Sequence
  synthetic sequence
tactgctctgtcc

SEQ ID NO: 1212 - DNA, 13 bp, Artificial Sequence
  synthetic sequence
cacaagacaccca

SEQ ID NO: 1213 - DNA, 13 bp, Artificial Sequence
  synthetic sequence
gtcagctttctca

SEQ ID NO: 1214 - DNA, 13 bp, Artificial Sequence
  synthetic sequence
tccatgttttctt

SEQ ID NO: 1215 - DNA, 13 bp, Artificial Sequence
  synthetic sequence
catcatgggggtg

SEQ ID NO: 1216 - DNA, 13 bp, Artificial Sequence
  synthetic sequence
catatgcggttcc

SEQ ID NO: 1217 - DNA, 13 bp, Artificial Sequence
  synthetic sequence
acagaagactttt

SEQ ID NO: 1218 - DNA, 13 bp, Artificial Sequence
  synthetic sequence
tgaatcttttcat

SEQ ID NO: 1219 - DNA, 13 bp, Artificial Sequence
  synthetic sequence
tgcccatgtccgg

SEQ ID NO: 1220 - DNA, 13 bp, Artificial Sequence
  synthetic sequence
gcctcgcgacaca

SEQ ID NO: 1221 - DNA, 13 bp, Artificial Sequence
  synthetic sequence
acagcctttccca

SEQ ID NO: 1222 - DNA, 13 bp, Artificial Sequence
  synthetic sequence
caacttcttctgt

SEQ ID NO: 1223 - DNA, 13 bp, Artificial Sequence
  synthetic sequence
tgttccagaacct

SEQ ID NO: 1224 - DNA, 13 bp, Artificial Sequence
  synthetic sequence
tgccttttgcttt

SEQ ID NO: 1225 - DNA, 13 bp, Artificial Sequence
  synthetic sequence
tattgtggtgttc

SEQ ID NO: 1226 - DNA, 13 bp, Artificial Sequence
  synthetic sequence
ttccatgagtatt

SEQ ID NO: 1227 - DNA, 13 bp, Artificial Sequence
  synthetic sequence
gctgtgtaagcac

SEQ ID NO: 1228 - DNA, 13 bp, Artificial Sequence
  synthetic sequence
ctcagcattggtg

SEQ ID NO: 1229 - DNA, 13 bp, Artificial Sequence
  synthetic sequence
tgcaggtcatctt

SEQ ID NO: 1230 - DNA, 13 bp, Artificial Sequence
  synthetic sequence
gatatcttattgg

SEQ ID NO: 1231 - DNA, 13 bp, Artificial Sequence
  synthetic sequence
cctcctgagtttt

SEQ ID NO: 1232 - DNA, 13 bp, Artificial Sequence
  synthetic sequence
gtcatccactggt

SEQ ID NO: 1233 - DNA, 13 bp, Artificial Sequence
  synthetic sequence
tgttacgattggg

SEQ ID NO: 1234 - DNA, 13 bp, Artificial Sequence
  synthetic sequence
gacttttcttctt

SEQ ID NO: 1235 - DNA, 13 bp, Artificial Sequence
  synthetic sequence
tggcactaacgta

SEQ ID NO: 1236 - DNA, 13 bp, Artificial Sequence
  synthetic sequence
gggattttcctct

SEQ ID NO: 1237 - DNA, 13 bp, Artificial Sequence
  synthetic sequence
ctccgtatgaaat

SEQ ID NO: 1238 - DNA, 13 bp, Artificial Sequence
  synthetic sequence
catctgttctgtg

SEQ ID NO: 1239 - DNA, 13 bp, Artificial Sequence
  synthetic sequence
agcaccacgtcaa

SEQ ID NO: 1240 - DNA, 13 bp, Artificial Sequence
  synthetic sequence
ttgaagtgagttt

SEQ ID NO: 1241 - DNA, 13 bp, Artificial Sequence
  synthetic sequence
cccatatcagcat

SEQ ID NO: 1242 - DNA, 13 bp, Artificial Sequence
  synthetic sequence
aaaacgtcaactc

SEQ ID NO: 1243 - DNA, 13 bp, Artificial Sequence
  synthetic sequence
ggagagcactcca

SEQ ID NO: 1244 - DNA, 13 bp, Artificial Sequence
  synthetic sequence
tggccattgtctt

SEQ ID NO: 1245 - DNA, 13 bp, Artificial Sequence
  synthetic sequence
attttagcctcat

SEQ ID NO: 1246 - DNA, 13 bp, Artificial Sequence
  synthetic sequence
tgccccaccctct

SEQ ID NO: 1247 - DNA, 13 bp, Artificial Sequence
  synthetic sequence
gtcgctggtattg

SEQ ID NO: 1248 - DNA, 13 bp, Artificial Sequence
  synthetic sequence
ggttagctgttat

SEQ ID NO: 1249 - DNA, 13 bp, Artificial Sequence
  synthetic sequence
gctggggtttggt

SEQ ID NO: 1250 - DNA, 13 bp, Artificial Sequence
  synthetic sequence
tatccagtacatt

SEQ ID NO: 1251 - DNA, 13 bp, Artificial Sequence
  synthetic sequence
cacctggttgttc

SEQ ID NO: 1252 - DNA, 13 bp, Artificial Sequence
  synthetic sequence
gaccctctggaca

SEQ ID NO: 1253 - DNA, 13 bp, Artificial Sequence
  synthetic sequence
ttctttcaaccct

SEQ ID NO: 1254 - DNA, 13 bp, Artificial Sequence
  synthetic sequence
attcctaatgaaa

SEQ ID NO: 1255 - DNA, 13 bp, Artificial Sequence
  synthetic sequence
catagccgttgtt

SEQ ID NO: 1256 - DNA, 13 bp, Artificial Sequence
  synthetic sequence
attccggacctgg

SEQ ID NO: 1257 - DNA, 13 bp, Artificial Sequence
  synthetic sequence
gatcttcatcatt

SEQ ID NO: 1258 - DNA, 13 bp, Artificial Sequence
  synthetic sequence
tctgtgactgtca

SEQ ID NO: 1259 - DNA, 13 bp, Artificial Sequence
  synthetic sequence
tggtaccttcaca

SEQ ID NO: 1260 - DNA, 13 bp, Artificial Sequence
  synthetic sequence
acctcttcattga

SEQ ID NO: 1261 - DNA, 13 bp, Artificial Sequence
  synthetic sequence
cggacaccactgc

SEQ ID NO: 1262 - DNA, 13 bp, Artificial Sequence
  synthetic sequence
tatgaggaagatt

SEQ ID NO: 1263 - DNA, 13 bp, Artificial Sequence
  synthetic sequence
agattaagaaaaa

SEQ ID NO: 1264 - DNA, 13 bp, Artificial Sequence
  synthetic sequence
tgatgaagattaa

SEQ ID NO: 1265 - DNA, 13 bp, Artificial Sequence
  synthetic sequence
atttcttccatgc

SEQ ID NO: 1266 - DNA, 13 bp, Artificial Sequence
  synthetic sequence
gaggaaaattttg

SEQ ID NO: 1267 - DNA, 13 bp, Artificial Sequence
  synthetic sequence
ggaaaattgcctt

SEQ ID NO: 1268 - DNA, 13 bp, Artificial Sequence
  synthetic sequence
agcaattcaaagt

SEQ ID NO: 1269 - DNA, 13 bp, Artificial Sequence
  synthetic sequence
aagattcacacca

SEQ ID NO: 1270 - DNA, 13 bp, Artificial Sequence
  synthetic sequence
gtatagagtcaga

SEQ ID NO: 1271 - DNA, 13 bp, Artificial Sequence
  synthetic sequence
tacaatcttgcat

SEQ ID NO: 1272 - DNA, 13 bp, Artificial Sequence
  synthetic sequence
tcatgtgctcaaa

SEQ ID NO: 1273 - DNA, 13 bp, Artificial Sequence
  synthetic sequence
ttcttcctgtatg

SEQ ID NO: 1274 - DNA, 13 bp, Artificial Sequence
  synthetic sequence
tggatttcggaac

SEQ ID NO: 1275 - DNA, 13 bp, Artificial Sequence
  synthetic sequence
gctcaagctcgtt

SEQ ID NO: 1276 - DNA, 13 bp, Artificial Sequence
  synthetic sequence
ttcaagagagtgc

SEQ ID NO: 1277 - DNA, 13 bp, Artificial Sequence
  synthetic sequence
gaagcggttcaag

SEQ ID NO: 1278 - DNA, 13 bp, Artificial Sequence
  synthetic sequence
caactgcaaattc

SEQ ID NO: 1279 - DNA, 13 bp, Artificial Sequence
  synthetic sequence
aagagaggccatt

SEQ ID NO: 1280 - DNA, 13 bp, Artificial Sequence
  synthetic sequence
tggtagtaggaga

SEQ ID NO: 1281 - DNA, 13 bp, Artificial Sequence
  synthetic sequence
gagtcatccttgc

SEQ ID NO: 1282 - DNA, 13 bp, Artificial Sequence
  synthetic sequence
acaattccacaag

SEQ ID NO: 1283 - DNA, 13 bp, Artificial Sequence
  synthetic sequence
ttgtacgaagctg

SEQ ID NO: 1284 - DNA, 13 bp, Artificial Sequence
  synthetic sequence
ctagacgaggacg

SEQ ID NO: 1285 - DNA, 13 bp, Artificial Sequence
  synthetic sequence
tgacaattggtgg

SEQ ID NO: 1286 - DNA, 13 bp, Artificial Sequence
  synthetic sequence
atcactttattcg

SEQ ID NO: 1287 - DNA, 13 bp, Artificial Sequence
  synthetic sequence
aaggaacacgcac

SEQ ID NO: 1288 - DNA, 13 bp, Artificial Sequence
  synthetic sequence
tgtaccagtggcg

SEQ ID NO: 1289 - DNA, 13 bp, Artificial Sequence
  synthetic sequence
gcagtattgaaat

SEQ ID NO: 1290 - DNA, 13 bp, Artificial Sequence
  synthetic sequence
gcaatgaattttt

SEQ ID NO: 1291 - DNA, 13 bp, Artificial Sequence
  synthetic sequence
ggacgatacaatc

SEQ ID NO: 1292 - DNA, 13 bp, Artificial Sequence
  synthetic sequence
tttcatcttttct

SEQ ID NO: 1293 - DNA, 13 bp, Artificial Sequence
  synthetic sequence
tcctctaaaagga

SEQ ID NO: 1294 - DNA, 13 bp, Artificial Sequence
  synthetic sequence
cacgtgtcattct

SEQ ID NO: 1295 - DNA, 13 bp, Artificial Sequence
  synthetic sequence
ctggccaagctga

SEQ ID NO: 1296 - DNA, 13 bp, Artificial Sequence
  synthetic sequence
aaacaatctcctc

SEQ ID NO: 1297 - DNA, 13 bp, Artificial Sequence
  synthetic sequence
atctaacatctcc

SEQ ID NO: 1298 - DNA, 13 bp, Artificial Sequence
  synthetic sequence
ggtgagttttcag

SEQ ID NO: 1299 - DNA, 13 bp, Artificial Sequence
  synthetic sequence
tgacaaatgataa

SEQ ID NO: 1300 - DNA, 13 bp, Artificial Sequence
  synthetic sequence
aacaatccaggat

SEQ ID NO: 1301 - DNA, 13 bp, Artificial Sequence
  synthetic sequence
attctcgtcctca

SEQ ID NO: 1302 - DNA, 13 bp, Artificial Sequence
  synthetic sequence
gaggcattcttca

SEQ ID NO: 1303 - DNA, 13 bp, Artificial Sequence
  synthetic sequence
gacacacctaagg

SEQ ID NO: 1304 - DNA, 13 bp, Artificial Sequence
  synthetic sequence
caattgcactcgg

SEQ ID NO: 1305 - DNA, 13 bp, Artificial Sequence
  synthetic sequence
ttaaatataactg

SEQ ID NO: 1306 - DNA, 13 bp, Artificial Sequence
  synthetic sequence
catcagcattcat

SEQ ID NO: 1307 - DNA, 13 bp, Artificial Sequence
  synthetic sequence
agtgacttaagta

SEQ ID NO: 1308 - DNA, 13 bp, Artificial Sequence
  synthetic sequence
acatccgctctcg

SEQ ID NO: 1309 - DNA, 13 bp, Artificial Sequence
  synthetic sequence
cttaacttcattt

SEQ ID NO: 1310 - DNA, 13 bp, Artificial Sequence
  synthetic sequence
ggggacatgctca

SEQ ID NO: 1311 - DNA, 13 bp, Artificial Sequence
  synthetic sequence
taaaagcattacg

SEQ ID NO: 1312 - DNA, 13 bp, Artificial Sequence
  synthetic sequence
tgcagttacctcg

SEQ ID NO: 1313 - DNA, 13 bp, Artificial Sequence
  synthetic sequence
atctcgtatcgct

SEQ ID NO: 1314 - DNA, 13 bp, Artificial Sequence
  synthetic sequence
actaaaagatggg

SEQ ID NO: 1315 - DNA, 13 bp, Artificial Sequence
  synthetic sequence
acagtgacaacac

SEQ ID NO: 1316 - DNA, 13 bp, Artificial Sequence
  synthetic sequence
catgttcgagcac

SEQ ID NO: 1317 - DNA, 13 bp, Artificial Sequence
  synthetic sequence
tagtgcataaatc

SEQ ID NO: 1318 - DNA, 13 bp, Artificial Sequence
  synthetic sequence
aggaagggccgat

SEQ ID NO: 1319 - DNA, 13 bp, Artificial Sequence
  synthetic sequence
gctaactcatata

SEQ ID NO: 1320 - DNA, 13 bp, Artificial Sequence
  synthetic sequence
gatatcaaagtac

SEQ ID NO: 1321 - DNA, 13 bp, Artificial Sequence
  synthetic sequence
tgtaataatcaga

SEQ ID NO: 1322 - DNA, 13 bp, Artificial Sequence
  synthetic sequence
gtcttaatgcaaa

SEQ ID NO: 1323 - DNA, 13 bp, Artificial Sequence
  synthetic sequence
gtttaatctgtgg

SEQ ID NO: 1324 - DNA, 13 bp, Artificial Sequence
  synthetic sequence
gattccaagacaa

SEQ ID NO: 1325 - DNA, 13 bp, Artificial Sequence
  synthetic sequence
atatatggaggcc

SEQ ID NO: 1326 - DNA, 13 bp, Artificial Sequence
  synthetic sequence
tgatacacttgtg

SEQ ID NO: 1327 - DNA, 13 bp, Artificial Sequence
  synthetic sequence
acatcagtggtca

SEQ ID NO: 1328 - DNA, 13 bp, Artificial Sequence
  synthetic sequence
tccggacaacagc

SEQ ID NO: 1329 - DNA, 13 bp, Artificial Sequence
  synthetic sequence
gattgattgatga

SEQ ID NO: 1330 - DNA, 13 bp, Artificial Sequence
  synthetic sequence
attggaaaccagg

SEQ ID NO: 1331 - DNA, 13 bp, Artificial Sequence
  synthetic sequence
cggaacataaatt

SEQ ID NO: 1332 - DNA, 13 bp, Artificial Sequence
  synthetic sequence
ttatcacatcaca

SEQ ID NO: 1333 - DNA, 13 bp, Artificial Sequence
  synthetic sequence
aggctgacagggc

SEQ ID NO: 1334 - DNA, 13 bp, Artificial Sequence
  synthetic sequence
aggcagacccact

SEQ ID NO: 1335 - DNA, 13 bp, Artificial Sequence
  synthetic sequence
ctattgctggagt

SEQ ID NO: 1336 - DNA, 13 bp, Artificial Sequence
  synthetic sequence
acaattcttcgga

SEQ ID NO: 1337 - DNA, 13 bp, Artificial Sequence
  synthetic sequence
aaaatcggggccc

SEQ ID NO: 1338 - DNA, 13 bp, Artificial Sequence
  synthetic sequence
ttgtgtgcgaata

SEQ ID NO: 1339 - DNA, 13 bp, Artificial Sequence
  synthetic sequence
agaacaacctagg

SEQ ID NO: 1340 - DNA, 13 bp, Artificial Sequence
  synthetic sequence
ttgttactgtaat

SEQ ID NO: 1341 - DNA, 13 bp, Artificial Sequence
  synthetic sequence
tctcattgaaatt

SEQ ID NO: 1342 - DNA, 13 bp, Artificial Sequence
  synthetic sequence
tcgggacccattt

SEQ ID NO: 1343 - DNA, 13 bp, Artificial Sequence
  synthetic sequence
ttcagagccatat

SEQ ID NO: 1344 - DNA, 13 bp, Artificial Sequence
  synthetic sequence
catcagtgtgctc

SEQ ID NO: 1345 - DNA, 13 bp, Artificial Sequence
  synthetic sequence
gacacacaaaaag

SEQ ID NO: 1346 - DNA, 13 bp, Artificial Sequence
  synthetic sequence
aaagtcgaaccca

SEQ ID NO: 1347 - DNA, 13 bp, Artificial Sequence
  synthetic sequence
atggctaaagcca

SEQ ID NO: 1348 - DNA, 13 bp, Artificial Sequence
  synthetic sequence
gtgagagtcatct

SEQ ID NO: 1349 - DNA, 13 bp, Artificial Sequence
  synthetic sequence
atagcaacattat

SEQ ID NO: 1350 - DNA, 13 bp, Artificial Sequence
  synthetic sequence
accaggctttcct

SEQ ID NO: 1351 - DNA, 13 bp, Artificial Sequence
  synthetic sequence
tggagttgccaca

SEQ ID NO: 1352 - DNA, 13 bp, Artificial Sequence
  synthetic sequence
gaggctattcaag

SEQ ID NO: 1353 - DNA, 13 bp, Artificial Sequence
  synthetic sequence
gataatgatgata

SEQ ID NO: 1354 - DNA, 13 bp, Artificial Sequence
  synthetic sequence
agtatctactgat

SEQ ID NO: 1355 - DNA, 13 bp, Artificial Sequence
  synthetic sequence
acaggccccacac

SEQ ID NO: 1356 - DNA, 13 bp, Artificial Sequence
  synthetic sequence
ctggcttcaactg

SEQ ID NO: 1357 - DNA, 13 bp, Artificial Sequence
  synthetic sequence
acgagacagaaga

SEQ ID NO: 1358 - DNA, 13 bp, Artificial Sequence
  synthetic sequence
atgccttagtctg

SEQ ID NO: 1359 - DNA, 13 bp, Artificial Sequence
  synthetic sequence
ttagcctactcca

SEQ ID NO: 1360 - DNA, 13 bp, Artificial Sequence
  synthetic sequence
taacttcaacagt

SEQ ID NO: 1361 - DNA, 13 bp, Artificial Sequence
  synthetic sequence
tcctcaccgacca

SEQ ID NO: 1362 - DNA, 13 bp, Artificial Sequence
  synthetic sequence
ttattctccacga

SEQ ID NO: 1363 - DNA, 13 bp, Artificial Sequence
  synthetic sequence
tcgtacaatgtgc

SEQ ID NO: 1364 - DNA, 13 bp, Artificial Sequence
  synthetic sequence
gtgccgactgcac

SEQ ID NO: 1365 - DNA, 13 bp, Artificial Sequence
  synthetic sequence
ctcactgatcaag

SEQ ID NO: 1366 - DNA, 13 bp, Artificial Sequence
  synthetic sequence
acttgcttaggaa

SEQ ID NO: 1367 - DNA, 13 bp, Artificial Sequence
  synthetic sequence
gttccaaaccaca

SEQ ID NO: 1368 - DNA, 13 bp, Artificial Sequence
  synthetic sequence
caacagtctgaag

SEQ ID NO: 1369 - DNA, 13 bp, Artificial Sequence
  synthetic sequence
agtatatacgatt

SEQ ID NO: 1370 - DNA, 13 bp, Artificial Sequence
  synthetic sequence
tctgtgcaaaact

SEQ ID NO: 1371 - DNA, 13 bp, Artificial Sequence
  synthetic sequence
ctaagattcaact

SEQ ID NO: 1372 - DNA, 13 bp, Artificial Sequence
  synthetic sequence
ttttatttgggta

SEQ ID NO: 1373 - DNA, 13 bp, Artificial Sequence
  synthetic sequence
tgcaactgcccac

SEQ ID NO: 1374 - DNA, 13 bp, Artificial Sequence
  synthetic sequence
ttgatctcttcaa

SEQ ID NO: 1375 - DNA, 13 bp, Artificial Sequence
  synthetic sequence
gccagttgctctt

SEQ ID NO: 1376 - DNA, 13 bp, Artificial Sequence
  synthetic sequence
aaatcatgcaaca

SEQ ID NO: 1377 - DNA, 13 bp, Artificial Sequence
  synthetic sequence
tggatcacaggat

SEQ ID NO: 1378 - DNA, 13 bp, Artificial Sequence
  synthetic sequence
gacaagatccatt

SEQ ID NO: 1379 - DNA, 13 bp, Artificial Sequence
  synthetic sequence
ggtcttctgattg

SEQ ID NO: 1380 - DNA, 13 bp, Artificial Sequence
  synthetic sequence
ttaattacaaggg

SEQ ID NO: 1381 - DNA, 13 bp, Artificial Sequence
  synthetic sequence
tagtcaatatgtt

SEQ ID NO: 1382 - DNA, 13 bp, Artificial Sequence
  synthetic sequence
cctcctgcaccag

SEQ ID NO: 1383 - DNA, 13 bp, Artificial Sequence
  synthetic sequence
cctctcctccaat

SEQ ID NO: 1384 - DNA, 13 bp, Artificial Sequence
  synthetic sequence
ttgctactgaaca

SEQ ID NO: 1385 - DNA, 13 bp, Artificial Sequence
  synthetic sequence
cttaagatatatg

SEQ ID NO: 1386 - DNA, 13 bp, Artificial Sequence
  synthetic sequence
gtgggtcgtattg

SEQ ID NO: 1387 - DNA, 13 bp, Artificial Sequence
  synthetic sequence
taagtattaagaa

SEQ ID NO: 1388 - DNA, 13 bp, Artificial Sequence
  synthetic sequence
ttgagctttgttg

SEQ ID NO: 1389 - DNA, 13 bp, Artificial Sequence
  synthetic sequence
tatacaggaagaa

SEQ ID NO: 1390 - DNA, 13 bp, Artificial Sequence
  synthetic sequence
aggtatgaattca

SEQ ID NO: 1391 - DNA, 13 bp, Artificial Sequence
  synthetic sequence
atgtccctgtagc

SEQ ID NO: 1392 - DNA, 13 bp, Artificial Sequence
  synthetic sequence
tggatcaactgat

SEQ ID NO: 1393 - DNA, 13 bp, Artificial Sequence
  synthetic sequence
actataggaaata

SEQ ID NO: 1394 - DNA, 13 bp, Artificial Sequence
  synthetic sequence
actgcaacttatc

SEQ ID NO: 1395 - DNA, 13 bp, Artificial Sequence
  synthetic sequence
tacccaaacttgt

SEQ ID NO: 1396 - DNA, 13 bp, Artificial Sequence
  synthetic sequence
cttggacaattgg

SEQ ID NO: 1397 - DNA, 13 bp, Artificial Sequence
  synthetic sequence
tgactcttccaat

SEQ ID NO: 1398 - DNA, 13 bp, Artificial Sequence
  synthetic sequence
cctgggtcactca

SEQ ID NO: 1399 - DNA, 13 bp, Artificial Sequence
  synthetic sequence
gcaagcaattttt

SEQ ID NO: 1400 - DNA, 13 bp, Artificial Sequence
  synthetic sequence
tgtgtcaatttat

SEQ ID NO: 1401 - DNA, 13 bp, Artificial Sequence
  synthetic sequence
ctaagggtttacc

SEQ ID NO: 1402 - DNA, 13 bp, Artificial Sequence
  synthetic sequence
gagtatttgtttc

SEQ ID NO: 1403 - DNA, 13 bp, Artificial Sequence
  synthetic sequence
ctcaatcactcaa

SEQ ID NO: 1404 - DNA, 13 bp, Artificial Sequence
  synthetic sequence
gccaaaatatttc

SEQ ID NO: 1405 - DNA, 13 bp, Artificial Sequence
  synthetic sequence
aaaagtaggtcca

SEQ ID NO: 1406 - DNA, 13 bp, Artificial Sequence
  synthetic sequence
acagaggtgtttg

SEQ ID NO: 1407 - DNA, 13 bp, Artificial Sequence
  synthetic sequence
gaaccagaacttt

SEQ ID NO: 1408 - DNA, 13 bp, Artificial Sequence
  synthetic sequence
tgaagaaagccgc

SEQ ID NO: 1409 - DNA, 13 bp, Artificial Sequence
  synthetic sequence
acttttatgttta

SEQ ID NO: 1410 - DNA, 13 bp, Artificial Sequence
  synthetic sequence
caaaaacagatat

SEQ ID NO: 1411 - DNA, 13 bp, Artificial Sequence
  synthetic sequence
ggcctcagcattc

SEQ ID NO: 1412 - DNA, 13 bp, Artificial Sequence
  synthetic sequence
tacatgtgtagtc

SEQ ID NO: 1413 - DNA, 13 bp, Artificial Sequence
  synthetic sequence
atgtttctgatct

SEQ ID NO: 1414 - DNA, 13 bp, Artificial Sequence
  synthetic sequence
cataagcttataa

SEQ ID NO: 1415 - DNA, 13 bp, Artificial Sequence
  synthetic sequence
ctctcccaatcaa

SEQ ID NO: 1416 - DNA, 13 bp, Artificial Sequence
  synthetic sequence
ccctgaatcgcag

SEQ ID NO: 1417 - DNA, 13 bp, Artificial Sequence
  synthetic sequence
ggcaatttaattg

SEQ ID NO: 1418 - DNA, 13 bp, Artificial Sequence
  synthetic sequence
ccgaagccatcac

SEQ ID NO: 1419 - DNA, 13 bp, Artificial Sequence
  synthetic sequence
caattgccccgtg

SEQ ID NO: 1420 - DNA, 13 bp, Artificial Sequence
  synthetic sequence
cggattaaatgtt

SEQ ID NO: 1421 - DNA, 13 bp, Artificial Sequence
  synthetic sequence
atgagtttacagc

SEQ ID NO: 1422 - DNA, 13 bp, Artificial Sequence
  synthetic sequence
ttgtggaggaggt

SEQ ID NO: 1423 - DNA, 13 bp, Artificial Sequence
  synthetic sequence
tgtgcacaaatct

SEQ ID NO: 1424 - DNA, 13 bp, Artificial Sequence
  synthetic sequence
agctgcaacaatt

SEQ ID NO: 1425 - DNA, 13 bp, Artificial Sequence
  synthetic sequence
aggaaatcaagcc

SEQ ID NO: 1426 - DNA, 13 bp, Artificial Sequence
  synthetic sequence
ggacgagcttttg

SEQ ID NO: 1427 - DNA, 13 bp, Artificial Sequence
  synthetic sequence
tttctgcaattgc

SEQ ID NO: 1428 - DNA, 13 bp, Artificial Sequence
  synthetic sequence
ttctttttgacct

SEQ ID NO: 1429 - DNA, 13 bp, Artificial Sequence
  synthetic sequence
aagggactagaac

SEQ ID NO: 1430 - DNA, 13 bp, Artificial Sequence
  synthetic sequence
tgctcaaattaca

SEQ ID NO: 1431 - DNA, 13 bp, Artificial Sequence
  synthetic sequence
aacaaaagactca

SEQ ID NO: 1432 - DNA, 13 bp, Artificial Sequence
  synthetic sequence
gttgtcggagaaa

SEQ ID NO: 1433 - DNA, 13 bp, Artificial Sequence
  synthetic sequence
gagaattttcagg

SEQ ID NO: 1434 - DNA, 13 bp, Artificial Sequence
  synthetic sequence
taaaagcattgcg

SEQ ID NO: 1435 - DNA, 13 bp, Artificial Sequence
  synthetic sequence
taatgcacaatca

SEQ ID NO: 1436 - DNA, 13 bp, Artificial Sequence
  synthetic sequence
agatagcacaagt

SEQ ID NO: 1437 - DNA, 13 bp, Artificial Sequence
  synthetic sequence
ctatgctcatttc

SEQ ID NO: 1438 - DNA, 13 bp, Artificial Sequence
  synthetic sequence
caaccccgtcgac

SEQ ID NO: 1439 - DNA, 13 bp, Artificial Sequence
  synthetic sequence
gctcgcttttcag

SEQ ID NO: 1440 - DNA, 13 bp, Artificial Sequence
  synthetic sequence
cgtcatccaatga

SEQ ID NO: 1441 - DNA, 13 bp, Artificial Sequence
  synthetic sequence
agagcccaggatc

SEQ ID NO: 1442 - DNA, 13 bp, Artificial Sequence
  synthetic sequence
atggaggaacaaa

SEQ ID NO: 1443 - DNA, 13 bp, Artificial Sequence
  synthetic sequence
actcaccaacacc

SEQ ID NO: 1444 - DNA, 13 bp, Artificial Sequence
  synthetic sequence
ttgacgatcatga

SEQ ID NO: 1445 - DNA, 13 bp, Artificial Sequence
  synthetic sequence
atccaagacatgg

SEQ ID NO: 1446 - DNA, 13 bp, Artificial Sequence
  synthetic sequence
cgtttattctagt

SEQ ID NO: 1447 - DNA, 13 bp, Artificial Sequence
  synthetic sequence
tttttcttaatct

SEQ ID NO: 1448 - DNA, 13 bp, Artificial Sequence
  synthetic sequence
gctggaagctgat

SEQ ID NO: 1449 - DNA, 13 bp, Artificial Sequence
  synthetic sequence
accatgtgcatcc

SEQ ID NO: 1450 - DNA, 13 bp, Artificial Sequence
  synthetic sequence
aatcagttacaaa

SEQ ID NO: 1451 - DNA, 13 bp, Artificial Sequence
  synthetic sequence
cttcaaaggcctg

SEQ ID NO: 1452 - DNA, 13 bp, Artificial Sequence
  synthetic sequence
tggtaaaattccc

SEQ ID NO: 1453 - DNA, 13 bp, Artificial Sequence
  synthetic sequence
ccatgctcaagat

SEQ ID NO: 1454 - DNA, 13 bp, Artificial Sequence
  synthetic sequence
tgggattttgaga

SEQ ID NO: 1455 - DNA, 13 bp, Artificial Sequence
  synthetic sequence
ccccagtgttttt

SEQ ID NO: 1456 - DNA, 13 bp, Artificial Sequence
  synthetic sequence
atataaggtttga

SEQ ID NO: 1457 - DNA, 13 bp, Artificial Sequence
  synthetic sequence
tttgaaataaatg

SEQ ID NO: 1458 - DNA, 13 bp, Artificial Sequence
  synthetic sequence
cttggtatttctg

SEQ ID NO: 1459 - DNA, 13 bp, Artificial Sequence
  synthetic sequence
aaggacattttgg

SEQ ID NO: 1460 - DNA, 13 bp, Artificial Sequence
  synthetic sequence
agatggttttggt

SEQ ID NO: 1461 - DNA, 13 bp, Artificial Sequence
  synthetic sequence
gttcttaaccctg

SEQ ID NO: 1462 - DNA, 13 bp, Artificial Sequence
  synthetic sequence
atcgcgttgctga

SEQ ID NO: 1463 - DNA, 13 bp, Artificial Sequence
  synthetic sequence
aacttgagaatat

SEQ ID NO: 1464 - DNA, 13 bp, Artificial Sequence
  synthetic sequence
ctctgtcacctgc

SEQ ID NO: 1465 - DNA, 13 bp, Artificial Sequence
  synthetic sequence
cgtgaggatgtac

SEQ ID NO: 1466 - DNA, 13 bp, Artificial Sequence
  synthetic sequence
ctcgaatctctgc

SEQ ID NO: 1467 - DNA, 13 bp, Artificial Sequence
  synthetic sequence
ccgttttccgagt

SEQ ID NO: 1468 - DNA, 13 bp, Artificial Sequence
  synthetic sequence
ccctaacactttg

SEQ ID NO: 1469 - DNA, 13 bp, Artificial Sequence
  synthetic sequence
agttgcgtagttg

SEQ ID NO: 1470 - DNA, 13 bp, Artificial Sequence
  synthetic sequence
tgtttatattctc

SEQ ID NO: 1471 - DNA, 13 bp, Artificial Sequence
  synthetic sequence
ataatgtaaagaa

SEQ ID NO: 1472 - DNA, 13 bp, Artificial Sequence
  synthetic sequence
gtgtggctccaat

SEQ ID NO: 1473 - DNA, 13 bp, Artificial Sequence
  synthetic sequence
tttcattgatttg

SEQ ID NO: 1474 - DNA, 13 bp, Artificial Sequence
  synthetic sequence
tgtcataaatcaa

SEQ ID NO: 1475 - DNA, 13 bp, Artificial Sequence
  synthetic sequence
tcgtaatgcgttg

SEQ ID NO: 1476 - DNA, 13 bp, Artificial Sequence
  synthetic sequence
cctctttttcagt

SEQ ID NO: 1477 - DNA, 13 bp, Artificial Sequence
  synthetic sequence
ttgggataagtta

SEQ ID NO: 1478 - DNA, 13 bp, Artificial Sequence
  synthetic sequence
acctccgcattaa

SEQ ID NO: 1479 - DNA, 13 bp, Artificial Sequence
  synthetic sequence
tcattagctgctc

SEQ ID NO: 1480 - DNA, 13 bp, Artificial Sequence
  synthetic sequence
catcaacacagtc

SEQ ID NO: 1481 - DNA, 13 bp, Artificial Sequence
  synthetic sequence
aaactttgcattc

SEQ ID NO: 1482 - DNA, 13 bp, Artificial Sequence
  synthetic sequence
ccgttcagtgcca

SEQ ID NO: 1483 - DNA, 13 bp, Artificial Sequence
  synthetic sequence
ttcccagggttct

SEQ ID NO: 1484 - DNA, 13 bp, Artificial Sequence
  synthetic sequence
gcatggcagcaag

SEQ ID NO: 1485 - DNA, 13 bp, Artificial Sequence
  synthetic sequence
agtttttcttaat

SEQ ID NO: 1486 - DNA, 13 bp, Artificial Sequence
  synthetic sequence
tttgcaatcgctt

SEQ ID NO: 1487 - DNA, 13 bp, Artificial Sequence
  synthetic sequence
agtccttcaatcc

SEQ ID NO: 1488 - DNA, 13 bp, Artificial Sequence
  synthetic sequence
ggtagtagatact

SEQ ID NO: 1489 - DNA, 13 bp, Artificial Sequence
  synthetic sequence
tgatgatattgca

SEQ ID NO: 1490 - DNA, 13 bp, Artificial Sequence
  synthetic sequence
gaatgctgtctgg

SEQ ID NO: 1491 - DNA, 13 bp, Artificial Sequence
  synthetic sequence
gatgtgtacagac

SEQ ID NO: 1492 - DNA, 13 bp, Artificial Sequence
  synthetic sequence
gtcttgcttggtg

SEQ ID NO: 1493 - DNA, 13 bp, Artificial Sequence
  synthetic sequence
agtaattccctat

SEQ ID NO: 1494 - DNA, 13 bp, Artificial Sequence
  synthetic sequence
tttttagtttccc

SEQ ID NO: 1495 - DNA, 13 bp, Artificial Sequence
  synthetic sequence
tccaagtcacact

SEQ ID NO: 1496 - DNA, 13 bp, Artificial Sequence
  synthetic sequence
gtaaaagaatggg

SEQ ID NO: 1497 - DNA, 13 bp, Artificial Sequence
  synthetic sequence
agcacaatggttc

SEQ ID NO: 1498 - DNA, 13 bp, Artificial Sequence
  synthetic sequence
ttgtagaatcaag

SEQ ID NO: 1499 - DNA, 13 bp, Artificial Sequence
  synthetic sequence
gagattcagtcca

SEQ ID NO: 1500 - DNA, 13 bp, Artificial Sequence
  synthetic sequence
aatcacttttatt

SEQ ID NO: 1501 - DNA, 13 bp, Artificial Sequence
  synthetic sequence
aattagggcacat

SEQ ID NO: 1502 - DNA, 13 bp, Artificial Sequence
  synthetic sequence
atggtatccaggc

SEQ ID NO: 1503 - DNA, 13 bp, Artificial Sequence
  synthetic sequence
caacctcgaacaa

SEQ ID NO: 1504 - DNA, 13 bp, Artificial Sequence
  synthetic sequence
gaatgtacaaatg

SEQ ID NO: 1505 - DNA, 13 bp, Artificial Sequence
  synthetic sequence
gatcaattttgtc

SEQ ID NO: 1506 - DNA, 13 bp, Artificial Sequence
  synthetic sequence
aagcacctttagt

SEQ ID NO: 1507 - DNA, 13 bp, Artificial Sequence
  synthetic sequence
ttcctgatacttt

SEQ ID NO: 1508 - DNA, 13 bp, Artificial Sequence
  synthetic sequence
ttgtaagggtgtc

SEQ ID NO: 1509 - DNA, 13 bp, Artificial Sequence
  synthetic sequence
tgtggcaagggtt

SEQ ID NO: 1510 - DNA, 13 bp, Artificial Sequence
  synthetic sequence
tgctcaacgttta

SEQ ID NO: 1511 - DNA, 13 bp, Artificial Sequence
  synthetic sequence
ggtgatgagtgtt

SEQ ID NO: 1512 - DNA, 13 bp, Artificial Sequence
  synthetic sequence
tttcttctgtcat

SEQ ID NO: 1513 - DNA, 13 bp, Artificial Sequence
  synthetic sequence
ttagggttgttga

SEQ ID NO: 1514 - DNA, 13 bp, Artificial Sequence
  synthetic sequence
ggtcctgatcttg

SEQ ID NO: 1515 - DNA, 13 bp, Artificial Sequence
  synthetic sequence
tctttcggaggga

SEQ ID NO: 1516 - DNA, 13 bp, Artificial Sequence
  synthetic sequence
caacttgagttgc

SEQ ID NO: 1517 - DNA, 13 bp, Artificial Sequence
  synthetic sequence
gactcctttcgtt

SEQ ID NO: 1518 - DNA, 13 bp, Artificial Sequence
  synthetic sequence
caatatccttcta

SEQ ID NO: 1519 - DNA, 13 bp, Artificial Sequence
  synthetic sequence
tttttcttaacct

SEQ ID NO: 1520 - DNA, 13 bp, Artificial Sequence
  synthetic sequence
gtgttatcaacca

SEQ ID NO: 1521 - DNA, 13 bp, Artificial Sequence
  synthetic sequence
ttactagacaaaa

SEQ ID NO: 1522 - DNA, 13 bp, Artificial Sequence
  synthetic sequence
aaatttttgtgtg

SEQ ID NO: 1523 - DNA, 13 bp, Artificial Sequence
  synthetic sequence
cttaattatcatt

SEQ ID NO: 1524 - DNA, 13 bp, Artificial Sequence
  synthetic sequence
atcctttttgcaa

SEQ ID NO: 1525 - DNA, 13 bp, Artificial Sequence
  synthetic sequence
tatcatacctctt

SEQ ID NO: 1526 - DNA, 13 bp, Artificial Sequence
  synthetic sequence
tgaagcttatttt

SEQ ID NO: 1527 - DNA, 13 bp, Artificial Sequence
  synthetic sequence
ggacacacaaaaa

SEQ ID NO: 1528 - DNA, 13 bp, Artificial Sequence
  synthetic sequence
tgtattgtgaatt

SEQ ID NO: 1529 - DNA, 13 bp, Artificial Sequence
  synthetic sequence
gtttcagcatcca

SEQ ID NO: 1530 - DNA, 13 bp, Artificial Sequence
  synthetic sequence
tatctagtctgct

SEQ ID NO: 1531 - DNA, 13 bp, Artificial Sequence
  synthetic sequence
tttttattttccc

SEQ ID NO: 1532 - DNA, 13 bp, Artificial Sequence
  synthetic sequence
gaccaagtcgatt

SEQ ID NO: 1533 - DNA, 13 bp, Artificial Sequence
  synthetic sequence
gtctcctcttcag

SEQ ID NO: 1534 - DNA, 13 bp, Artificial Sequence
  synthetic sequence
acaaagtcaattg

SEQ ID NO: 1535 - DNA, 13 bp, Artificial Sequence
  synthetic sequence
ctaaatagttatt

SEQ ID NO: 1536 - DNA, 13 bp, Artificial Sequence
  synthetic sequence
tgtccaatcatgt

SEQ ID NO: 1537 - DNA, 13 bp, Artificial Sequence
  synthetic sequence
agattggctcaaa

SEQ ID NO: 1538 - DNA, 13 bp, Artificial Sequence
  synthetic sequence
tgttgaactccat

SEQ ID NO: 1539 - DNA, 13 bp, Artificial Sequence
  synthetic sequence
ttgactccagaaa

SEQ ID NO: 1540 - DNA, 13 bp, Artificial Sequence
  synthetic sequence
tccgttttgttat

SEQ ID NO: 1541 - DNA, 13 bp, Artificial Sequence
  synthetic sequence
aagcaatgacaat

SEQ ID NO: 1542 - DNA, 13 bp, Artificial Sequence
  synthetic sequence
taccagtcagttg

SEQ ID NO: 1543 - DNA, 13 bp, Artificial Sequence
  synthetic sequence
ggatgcccccaat

SEQ ID NO: 1544 - DNA, 13 bp, Artificial Sequence
  synthetic sequence
tgatagaattccc

SEQ ID NO: 1545 - DNA, 13 bp, Artificial Sequence
  synthetic sequence
cctgagtgtacga

SEQ ID NO: 1546 - DNA, 13 bp, Artificial Sequence
  synthetic sequence
aaccgctgttgtt

SEQ ID NO: 1547 - DNA, 13 bp, Artificial Sequence
  synthetic sequence
ttccttgggcttt

SEQ ID NO: 1548 - DNA, 13 bp, Artificial Sequence
  synthetic sequence
agtacgggatcca

SEQ ID NO: 1549 - DNA, 13 bp, Artificial Sequence
  synthetic sequence
gagcaccaaaatt

SEQ ID NO: 1550 - DNA, 13 bp, Artificial Sequence
  synthetic sequence
ctgtcgaattctg

SEQ ID NO: 1551 - DNA, 13 bp, Artificial Sequence
  synthetic sequence
tcagctggtcagt

SEQ ID NO: 1552 - DNA, 13 bp, Artificial Sequence
  synthetic sequence
tggtggagatctg

SEQ ID NO: 1553 - DNA, 13 bp, Artificial Sequence
  synthetic sequence
ggtgatgatgttg

SEQ ID NO: 1554 - DNA, 13 bp, Artificial Sequence
  synthetic sequence
tcaatgccttaat

SEQ ID NO: 1555 - DNA, 13 bp, Artificial Sequence
  synthetic sequence
atatgttttggta

SEQ ID NO: 1556 - DNA, 13 bp, Artificial Sequence
  synthetic sequence
ggaaccttctcat

SEQ ID NO: 1557 - DNA, 13 bp, Artificial Sequence
  synthetic sequence
gtggatgaagatt

SEQ ID NO: 1558 - DNA, 13 bp, Artificial Sequence
  synthetic sequence
ttgaacaagtgtg

SEQ ID NO: 1559 - DNA, 13 bp, Artificial Sequence
  synthetic sequence
atcctcgtagtca

SEQ ID NO: 1560 - DNA, 13 bp, Artificial Sequence
  synthetic sequence
tatgaactagggc

SEQ ID NO: 1561 - DNA, 13 bp, Artificial Sequence
  synthetic sequence
gaagtagaacggg

SEQ ID NO: 1562 - DNA, 13 bp, Artificial Sequence
  synthetic sequence
gattttgtggact

SEQ ID NO: 1563 - DNA, 13 bp, Artificial Sequence
  synthetic sequence
atctagatttagc

SEQ ID NO: 1564 - DNA, 13 bp, Artificial Sequence
  synthetic sequence
tcacctgcagtcc

SEQ ID NO: 1565 - DNA, 13 bp, Artificial Sequence
  synthetic sequence
gattattttgtac

SEQ ID NO: 1566 - DNA, 13 bp, Artificial Sequence
  synthetic sequence
gagcttatttata

SEQ ID NO: 1567 - DNA, 13 bp, Artificial Sequence
  synthetic sequence
agatttgaagagc

SEQ ID NO: 1568 - DNA, 13 bp, Artificial Sequence
  synthetic sequence
gaagcccctcaat

SEQ ID NO: 1569 - DNA, 13 bp, Artificial Sequence
  synthetic sequence
gtctgtgacaaaa

SEQ ID NO: 1570 - DNA, 13 bp, Artificial Sequence
  synthetic sequence
tgttttgatttct

SEQ ID NO: 1571 - DNA, 13 bp, Artificial Sequence
  synthetic sequence
gattctggggcaa

SEQ ID NO: 1572 - DNA, 13 bp, Artificial Sequence
  synthetic sequence
ttatgaccatagt

SEQ ID NO: 1573 - DNA, 13 bp, Artificial Sequence
  synthetic sequence
ttgtaatcttttc

SEQ ID NO: 1574 - DNA, 13 bp, Artificial Sequence
  synthetic sequence
gttgctgtgttac

SEQ ID NO: 1575 - DNA, 13 bp, Artificial Sequence
  synthetic sequence
ccctattaactgt

SEQ ID NO: 1576 - DNA, 13 bp, Artificial Sequence
  synthetic sequence
tgctgagtagttc

SEQ ID NO: 1577 - DNA, 13 bp, Artificial Sequence
  synthetic sequence
accagataacgat

SEQ ID NO: 1578 - DNA, 13 bp, Artificial Sequence
  synthetic sequence
atcgcaaaatgag

SEQ ID NO: 1579 - DNA, 13 bp, Artificial Sequence
  synthetic sequence
aattgcaatttag

SEQ ID NO: 1580 - DNA, 13 bp, Artificial Sequence
  synthetic sequence
gaatttccgcact

SEQ ID NO: 1581 - DNA, 13 bp, Artificial Sequence
  synthetic sequence
ggcttaatagcgg

SEQ ID NO: 1582 - DNA, 13 bp, Artificial Sequence
  synthetic sequence
cttcttaacgccg

SEQ ID NO: 1583 - DNA, 13 bp, Artificial Sequence
  synthetic sequence
gattataatcagt

SEQ ID NO: 1584 - DNA, 13 bp, Artificial Sequence
  synthetic sequence
ttactccttcctg

SEQ ID NO: 1585 - DNA, 13 bp, Artificial Sequence
  synthetic sequence
gcctgatatcact

SEQ ID NO: 1586 - DNA, 13 bp, Artificial Sequence
  synthetic sequence
tttcagaaccttg

SEQ ID NO: 1587 - DNA, 13 bp, Artificial Sequence
  synthetic sequence
cagaaaaccagcc

SEQ ID NO: 1588 - DNA, 13 bp, Artificial Sequence
  synthetic sequence
taagaagtgggtt

SEQ ID NO: 1589 - DNA, 13 bp, Artificial Sequence
  synthetic sequence
attgccttgtggt

SEQ ID NO: 1590 - DNA, 13 bp, Artificial Sequence
  synthetic sequence
atggaatcttagg

SEQ ID NO: 1591 - DNA, 13 bp, Artificial Sequence
  synthetic sequence
ccttggactatct

SEQ ID NO: 1592 - DNA, 13 bp, Artificial Sequence
  synthetic sequence
ttacagggatact

SEQ ID NO: 1593 - DNA, 13 bp, Artificial Sequence
  synthetic sequence
tcccatagtatat

SEQ ID NO: 1594 - DNA, 13 bp, Artificial Sequence
  synthetic sequence
atcttaaaaacaa

SEQ ID NO: 1595 - DNA, 13 bp, Artificial Sequence
  synthetic sequence
cttgcatattgtt

SEQ ID NO: 1596 - DNA, 13 bp, Artificial Sequence
  synthetic sequence
agatatgtttcgg

SEQ ID NO: 1597 - DNA, 13 bp, Artificial Sequence
  synthetic sequence
tcccgttcggatc

SEQ ID NO: 1598 - DNA, 13 bp, Artificial Sequence
  synthetic sequence
ttaagctggcctc

SEQ ID NO: 1599 - DNA, 13 bp, Artificial Sequence
  synthetic sequence
ttaattttcctgg

SEQ ID NO: 1600 - DNA, 13 bp, Artificial Sequence
  synthetic sequence
tagaaatgtatca

SEQ ID NO: 1601 - DNA, 13 bp, Artificial Sequence
  synthetic sequence
agatgaaggtaag

SEQ ID NO: 1602 - DNA, 13 bp, Artificial Sequence
  synthetic sequence
atttgagaaggag

SEQ ID NO: 1603 - DNA, 13 bp, Artificial Sequence
  synthetic sequence
gtctcatctggtt

SEQ ID NO: 1604 - DNA, 13 bp, Artificial Sequence
  synthetic sequence
gctaccatatgca

SEQ ID NO: 1605 - DNA, 13 bp, Artificial Sequence
  synthetic sequence
gcactattccatc

SEQ ID NO: 1606 - DNA, 13 bp, Artificial Sequence
  synthetic sequence
tgcggagtttatt

SEQ ID NO: 1607 - DNA, 13 bp, Artificial Sequence
  synthetic sequence
gtatgtgtgccca

SEQ ID NO: 1608 - DNA, 13 bp, Artificial Sequence
  synthetic sequence
gataccagtcctt

SEQ ID NO: 1609 - DNA, 13 bp, Artificial Sequence
  synthetic sequence
aatgtttgcattt

SEQ ID NO: 1610 - DNA, 13 bp, Artificial Sequence
  synthetic sequence
gctgcccaatctt

SEQ ID NO: 1611 - DNA, 13 bp, Artificial Sequence
  synthetic sequence
catgatgactgtg

SEQ ID NO: 1612 - DNA, 13 bp, Artificial Sequence
  synthetic sequence
agacctctactgt

SEQ ID NO: 1613 - DNA, 13 bp, Artificial Sequence
  synthetic sequence
caattatgcatat

SEQ ID NO: 1614 - DNA, 13 bp, Artificial Sequence
  synthetic sequence
acacctaatctct

SEQ ID NO: 1615 - DNA, 13 bp, Artificial Sequence
  synthetic sequence
tataaccttctga

SEQ ID NO: 1616 - DNA, 13 bp, Artificial Sequence
  synthetic sequence
gacaatgtaaaaa

SEQ ID NO: 1617 - DNA, 13 bp, Artificial Sequence
  synthetic sequence
ctgaaataacaac

SEQ ID NO: 1618 - DNA, 13 bp, Artificial Sequence
  synthetic sequence
tgcctctaacagt

SEQ ID NO: 1619 - DNA, 13 bp, Artificial Sequence
  synthetic sequence
acctgtagagacc

SEQ ID NO: 1620 - DNA, 13 bp, Artificial Sequence
  synthetic sequence
cccttaggatggg

SEQ ID NO: 1621 - DNA, 13 bp, Artificial Sequence
  synthetic sequence
agtgtataatata

SEQ ID NO: 1622 - DNA, 13 bp, Artificial Sequence
  synthetic sequence
ttctgcgagtaga

SEQ ID NO: 1623 - DNA, 13 bp, Artificial Sequence
  synthetic sequence
ttgtcagtaatgt

SEQ ID NO: 1624 - DNA, 13 bp, Artificial Sequence
  synthetic sequence
ctttgtggaaagc

SEQ ID NO: 1625 - DNA, 13 bp, Artificial Sequence
  synthetic sequence
ggtgtgcggtgtt

SEQ ID NO: 1626 - DNA, 13 bp, Artificial Sequence
  synthetic sequence
ttgaaccaggaac

SEQ ID NO: 1627 - DNA, 13 bp, Artificial Sequence
  synthetic sequence
ccttctagattaa

SEQ ID NO: 1628 - DNA, 13 bp, Artificial Sequence
  synthetic sequence
attccctctgctg

SEQ ID NO: 1629 - DNA, 13 bp, Artificial Sequence
  synthetic sequence
aaacagaaagtta

SEQ ID NO: 1630 - DNA, 13 bp, Artificial Sequence
  synthetic sequence
atgtcaattgggt

SEQ ID NO: 1631 - DNA, 13 bp, Artificial Sequence
  synthetic sequence
gagaaagaaaaat

SEQ ID NO: 1632 - DNA, 13 bp, Artificial Sequence
  synthetic sequence
catcttgcgggag

SEQ ID NO: 1633 - DNA, 13 bp, Artificial Sequence
  synthetic sequence
gttaaactttcta

SEQ ID NO: 1634 - DNA, 13 bp, Artificial Sequence
  synthetic sequence
atggaatccatgc

SEQ ID NO: 1635 - DNA, 13 bp, Artificial Sequence
  synthetic sequence
cctttattaaatc

SEQ ID NO: 1636 - DNA, 13 bp, Artificial Sequence
  synthetic sequence
aatttttcctgac

SEQ ID NO: 1637 - DNA, 13 bp, Artificial Sequence
  synthetic sequence
taagtctcgtatc

SEQ ID NO: 1638 - DNA, 13 bp, Artificial Sequence
  synthetic sequence
gtggtactgcctg

SEQ ID NO: 1639 - DNA, 13 bp, Artificial Sequence
  synthetic sequence
ggaaccggtgagt

SEQ ID NO: 1640 - DNA, 13 bp, Artificial Sequence
  synthetic sequence
cctatccccaagg

SEQ ID NO: 1641 - DNA, 13 bp, Artificial Sequence
  synthetic sequence
ccatggcgttagt

SEQ ID NO: 1642 - DNA, 13 bp, Artificial Sequence
  synthetic sequence
gacacactccagt

SEQ ID NO: 1643 - DNA, 13 bp, Artificial Sequence
  synthetic sequence
tcgttatctgtga

SEQ ID NO: 1644 - DNA, 13 bp, Artificial Sequence
  synthetic sequence
tggtcacgaggca

SEQ ID NO: 1645 - DNA, 13 bp, Artificial Sequence
  synthetic sequence
taccaatgttgtg

SEQ ID NO: 1646 - DNA, 13 bp, Artificial Sequence
  synthetic sequence
cgtgctcaaggag

SEQ ID NO: 1647 - DNA, 13 bp, Artificial Sequence
  synthetic sequence
tcaccattgagac

SEQ ID NO: 1648 - DNA, 13 bp, Artificial Sequence
  synthetic sequence
gcaagttccttgc

SEQ ID NO: 1649 - DNA, 13 bp, Artificial Sequence
  synthetic sequence
aacatcgtggacg

SEQ ID NO: 1650 - DNA, 13 bp, Artificial Sequence
  synthetic sequence
cactcccctgtga

SEQ ID NO: 1651 - DNA, 13 bp, Artificial Sequence
  synthetic sequence
ctcagaaaacttg

SEQ ID NO: 1652 - DNA, 13 bp, Artificial Sequence
  synthetic sequence
tttgacatcacca

SEQ ID NO: 1653 - DNA, 13 bp, Artificial Sequence
  synthetic sequence
tgccaggaccatc

SEQ ID NO: 1654 - DNA, 13 bp, Artificial Sequence
  synthetic sequence
tctatcccggcca

SEQ ID NO: 1655 - DNA, 13 bp, Artificial Sequence
  synthetic sequence
aggacctggtcaa

SEQ ID NO: 1656 - DNA, 13 bp, Artificial Sequence
  synthetic sequence
tcgtgtgctgctc

SEQ ID NO: 1657 - DNA, 13 bp, Artificial Sequence
  synthetic sequence
cgatgaggatcgt

SEQ ID NO: 1658 - DNA, 13 bp, Artificial Sequence
  synthetic sequence
ccgtacatcgagc

SEQ ID NO: 1659 - DNA, 13 bp, Artificial Sequence
  synthetic sequence
acggggtgcgcct

SEQ ID NO: 1660 - DNA, 13 bp, Artificial Sequence
  synthetic sequence
ggcaaggctatcc

SEQ ID NO: 1661 - DNA, 13 bp, Artificial Sequence
  synthetic sequence
tgggcaattggtt

SEQ ID NO: 1662 - DNA, 13 bp, Artificial Sequence
  synthetic sequence
gtaagccagctcg

SEQ ID NO: 1663 - DNA, 13 bp, Artificial Sequence
  synthetic sequence
ccctgacgcaccc

SEQ ID NO: 1664 - DNA, 13 bp, Artificial Sequence
  synthetic sequence
ggcactacccctg

SEQ ID NO: 1665 - DNA, 13 bp, Artificial Sequence
  synthetic sequence
agcccactaacca

SEQ ID NO: 1666 - DNA, 13 bp, Artificial Sequence
  synthetic sequence
cggggtgtgtccc

SEQ ID NO: 1667 - DNA, 13 bp, Artificial Sequence
  synthetic sequence
gactcccctgacg

SEQ ID NO: 1668 - DNA, 13 bp, Artificial Sequence
  synthetic sequence
ttcacggacaact

SEQ ID NO: 1669 - DNA, 13 bp, Artificial Sequence
  synthetic sequence
gccgggacaaaaa

SEQ ID NO: 1670 - DNA, 13 bp, Artificial Sequence
  synthetic sequence
tgctccggttcct

SEQ ID NO: 1671 - DNA, 13 bp, Artificial Sequence
  synthetic sequence
gtgggtgcccgga

SEQ ID NO: 1672 - DNA, 13 bp, Artificial Sequence
  synthetic sequence
cggactacaaccc

SEQ ID NO: 1673 - DNA, 13 bp, Artificial Sequence
  synthetic sequence
ggctttggcatta

SEQ ID NO: 1674 - DNA, 13 bp, Artificial Sequence
  synthetic sequence
tgtggcggcgttg

SEQ ID NO: 1675 - DNA, 13 bp, Artificial Sequence
  synthetic sequence
cgcacaacggcct

SEQ ID NO: 1676 - DNA, 13 bp, Artificial Sequence
  synthetic sequence
cgcaagccagctc

SEQ ID NO: 1677 - DNA, 13 bp, Artificial Sequence
  synthetic sequence
gggacaagaacca

SEQ ID NO: 1678 - DNA, 13 bp, Artificial Sequence
  synthetic sequence
ggtgcgtgccctg

SEQ ID NO: 1679 - DNA, 13 bp, Artificial Sequence
  synthetic sequence
gtggacgtgcagt

SEQ ID NO: 1680 - DNA, 13 bp, Artificial Sequence
  synthetic sequence
gaggactgctcca

SEQ ID NO: 1681 - DNA, 13 bp, Artificial Sequence
  synthetic sequence
agcaacacgtggc

SEQ ID NO: 1682 - DNA, 13 bp, Artificial Sequence
  synthetic sequence
tcaccagcccgct

SEQ ID NO: 1683 - DNA, 13 bp, Artificial Sequence
  synthetic sequence
tgcacaggtacgc

SEQ ID NO: 1684 - DNA, 13 bp, Artificial Sequence
  synthetic sequence
aacaacacgcggc

SEQ ID NO: 1685 - DNA, 13 bp, Artificial Sequence
  synthetic sequence
gccaagaccatct

SEQ ID NO: 1686 - DNA, 13 bp, Artificial Sequence
  synthetic sequence
tggggtcccatca

SEQ ID NO: 1687 - DNA, 13 bp, Artificial Sequence
  synthetic sequence
tgcagctcgccga

SEQ ID NO: 1688 - DNA, 13 bp, Artificial Sequence
  synthetic sequence
tgaaggcgacatg

SEQ ID NO: 1689 - DNA, 13 bp, Artificial Sequence
  synthetic sequence
tcacagacaactc

SEQ ID NO: 1690 - DNA, 13 bp, Artificial Sequence
  synthetic sequence
tggtctaccgtga

SEQ ID NO: 1691 - DNA, 13 bp, Artificial Sequence
  synthetic sequence
gattacaaccctc

SEQ ID NO: 1692 - DNA, 13 bp, Artificial Sequence
  synthetic sequence
ggctaggagccgt

SEQ ID NO: 1693 - DNA, 13 bp, Artificial Sequence
  synthetic sequence
aaagccatcccca

SEQ ID NO: 1694 - DNA, 13 bp, Artificial Sequence
  synthetic sequence
cctctgagcccgc

SEQ ID NO: 1695 - DNA, 13 bp, Artificial Sequence
  synthetic sequence
acatcaagggcag

SEQ ID NO: 1696 - DNA, 13 bp, Artificial Sequence
  synthetic sequence
acagcggcacggc

SEQ ID NO: 1697 - DNA, 13 bp, Artificial Sequence
  synthetic sequence
ctcaggaaacttg

SEQ ID NO: 1698 - DNA, 13 bp, Artificial Sequence
  synthetic sequence
tggcagttgagcc

SEQ ID NO: 1699 - DNA, 13 bp, Artificial Sequence
  synthetic sequence
gcaactgttccat

SEQ ID NO: 1700 - DNA, 13 bp, Artificial Sequence
  synthetic sequence
actccacctacgg

SEQ ID NO: 1701 - DNA, 13 bp, Artificial Sequence
  synthetic sequence
tggagttctggga

SEQ ID NO: 1702 - DNA, 13 bp, Artificial Sequence
  synthetic sequence
agcgatcccagcc

SEQ ID NO: 1703 - DNA, 13 bp, Artificial Sequence
  synthetic sequence
ctcaggaagcttg

SEQ ID NO: 1704 - DNA, 13 bp, Artificial Sequence
  synthetic sequence
acgtcaccggggg

SEQ ID NO: 1705 - DNA, 13 bp, Artificial Sequence
  synthetic sequence
ctgccatcctctc

SEQ ID NO: 1706 - DNA, 13 bp, Artificial Sequence
  synthetic sequence
cacactccagtca

SEQ ID NO: 1707 - DNA, 13 bp, Artificial Sequence
  synthetic sequence
tcagcttggaccc

SEQ ID NO: 1708 - DNA, 13 bp, Artificial Sequence
  synthetic sequence
tgcaagcccttgc

SEQ ID NO: 1709 - DNA, 13 bp, Artificial Sequence
  synthetic sequence
taccagtgttgtg

SEQ ID NO: 1710 - DNA, 13 bp, Artificial Sequence
  synthetic sequence
ggccggactataa

SEQ ID NO: 1711 - DNA, 13 bp, Artificial Sequence
  synthetic sequence
gctcgcctcatcg

SEQ ID NO: 1712 - DNA, 13 bp, Artificial Sequence
  synthetic sequence
tgcccgccatcct

SEQ ID NO: 1713 - DNA, 13 bp, Artificial Sequence
  synthetic sequence
aggccatccccct

SEQ ID NO: 1714 - DNA, 13 bp, Artificial Sequence
  synthetic sequence
gaacggtcccagc

SEQ ID NO: 1715 - DNA, 13 bp, Artificial Sequence
  synthetic sequence
cactcccctgtca

SEQ ID NO: 1716 - DNA, 13 bp, Artificial Sequence
  synthetic sequence
taacgggtcaccg

SEQ ID NO: 1717 - DNA, 13 bp, Artificial Sequence
  synthetic sequence
gtggacgtgcaat

SEQ ID NO: 1718 - DNA, 13 bp, Artificial Sequence
  synthetic sequence
tcctaaacctcaa

SEQ ID NO: 1719 - DNA, 13 bp, Artificial Sequence
  synthetic sequence
ggcgtcgccagag

SEQ ID NO: 1720 - DNA, 13 bp, Artificial Sequence
  synthetic sequence
cgtgcttaaggag

SEQ ID NO: 1721 - DNA, 13 bp, Artificial Sequence
  synthetic sequence
gtacattcccgtc

SEQ ID NO: 1722 - DNA, 13 bp, Artificial Sequence
  synthetic sequence
ggcctgactacaa

SEQ ID NO: 1723 - DNA, 13 bp, Artificial Sequence
  synthetic sequence
gcaactgctccat

SEQ ID NO: 1724 - DNA, 13 bp, Artificial Sequence
  synthetic sequence
ccgtccaaaatga

SEQ ID NO: 1725 - DNA, 13 bp, Artificial Sequence
  synthetic sequence
actccacctatgg

SEQ ID NO: 1726 - DNA, 13 bp, Artificial Sequence
  synthetic sequence
aggacatggtcaa

SEQ ID NO: 1727 - DNA, 13 bp, Artificial Sequence
  synthetic sequence
acgctgatgtcat

SEQ ID NO: 1728 - DNA, 13 bp, Artificial Sequence
  synthetic sequence
ttcagccttgacc

SEQ ID NO: 1729 - DNA, 13 bp, Artificial Sequence
  synthetic sequence
tcaactacaccat

SEQ ID NO: 1730 - DNA, 13 bp, Artificial Sequence
  synthetic sequence
ttcgacatcacca

SEQ ID NO: 1731 - DNA, 13 bp, Artificial Sequence
  synthetic sequence
ctttaccatcacc

SEQ ID NO: 1732 - DNA, 13 bp, Artificial Sequence
  synthetic sequence
actccacatatgg

SEQ ID NO: 1733 - DNA, 13 bp, Artificial Sequence
  synthetic sequence
tgttggtgtgcgg

SEQ ID NO: 1734 - DNA, 13 bp, Artificial Sequence
  synthetic sequence
gccaagaccacct

SEQ ID NO: 1735 - DNA, 13 bp, Artificial Sequence
  synthetic sequence
agtggatcaatga

SEQ ID NO: 1736 - DNA, 13 bp, Artificial Sequence
  synthetic sequence
tgtggcattatcc

SEQ ID NO: 1737 - DNA, 13 bp, Artificial Sequence
  synthetic sequence
atgactcagtctt

SEQ ID NO: 1738 - DNA, 13 bp, Artificial Sequence
  synthetic sequence
tggcgctgactct

SEQ ID NO: 1739 - DNA, 13 bp, Artificial Sequence
  synthetic sequence
aagacatggtcaa

SEQ ID NO: 1740 - DNA, 13 bp, Artificial Sequence
  synthetic sequence
gacaaaaatgagg

SEQ ID NO: 1741 - DNA, 13 bp, Artificial Sequence
  synthetic sequence
agagcttccaggt

SEQ ID NO: 1742 - DNA, 13 bp, Artificial Sequence
  synthetic sequence
tggtcacgagaca

SEQ ID NO: 1743 - DNA, 13 bp, Artificial Sequence
  synthetic sequence
cagactacaaccc

SEQ ID NO: 1744 - DNA, 13 bp, Artificial Sequence
  synthetic sequence
ctctcaaggcaac

SEQ ID NO: 1745 - DNA, 13 bp, Artificial Sequence
  synthetic sequence
ggataagctcgga

SEQ ID NO: 1746 - DNA, 13 bp, Artificial Sequence
  synthetic sequence
gtctgcggagacg

SEQ ID NO: 1747 - DNA, 13 bp, Artificial Sequence
  synthetic sequence
tgctgctccatgt

SEQ ID NO: 1748 - DNA, 13 bp, Artificial Sequence
  synthetic sequence
ggcaaggctattc

SEQ ID NO: 1749 - DNA, 13 bp, Artificial Sequence
  synthetic sequence
gctgtgccccaga

SEQ ID NO: 1750 - DNA, 13 bp, Artificial Sequence
  synthetic sequence
ggtttgaggtcac

SEQ ID NO: 1751 - DNA, 13 bp, Artificial Sequence
  synthetic sequence
tcatctcagagag

SEQ ID NO: 1752 - DNA, 13 bp, Artificial Sequence
  synthetic sequence
tcgtgtgttgctc

SEQ ID NO: 1753 - DNA, 13 bp, Artificial Sequence
  synthetic sequence
cgggcgacaatac

SEQ ID NO: 1754 - DNA, 13 bp, Artificial Sequence
  synthetic sequence
ggcacatccccta

SEQ ID NO: 1755 - DNA, 13 bp, Artificial Sequence
  synthetic sequence
acactccaccatg

SEQ ID NO: 1756 - DNA, 13 bp, Artificial Sequence
  synthetic sequence
tgtggcactaccc

SEQ ID NO: 1757 - DNA, 13 bp, Artificial Sequence
  synthetic sequence
tgcgttcgcgagg

SEQ ID NO: 1758 - DNA, 13 bp, Artificial Sequence
  synthetic sequence
atctggccgtggc

SEQ ID NO: 1759 - DNA, 13 bp, Artificial Sequence
  synthetic sequence
acgagggaggccg

SEQ ID NO: 1760 - DNA, 13 bp, Artificial Sequence
  synthetic sequence
tggtccctggggc

SEQ ID NO: 1761 - DNA, 13 bp, Artificial Sequence
  synthetic sequence
attgctccatcta

SEQ ID NO: 1762 - DNA, 13 bp, Artificial Sequence
  synthetic sequence
tgtggcattaccc

SEQ ID NO: 1763 - DNA, 13 bp, Artificial Sequence
  synthetic sequence
cccaagacatgca

SEQ ID NO: 1764 - DNA, 13 bp, Artificial Sequence
  synthetic sequence
tgtggcactatcc

SEQ ID NO: 1765 - DNA, 13 bp, Artificial Sequence
  synthetic sequence
tcacggagaggga

SEQ ID NO: 1766 - DNA, 13 bp, Artificial Sequence
  synthetic sequence
tccggactgagaa

SEQ ID NO: 1767 - DNA, 13 bp, Artificial Sequence
  synthetic sequence
tacatcccgctcg

SEQ ID NO: 1768 - DNA, 13 bp, Artificial Sequence
  synthetic sequence
gcgtgggagacag

SEQ ID NO: 1769 - DNA, 13 bp, Artificial Sequence
  synthetic sequence
aacatcgtggatg

SEQ ID NO: 1770 - DNA, 13 bp, Artificial Sequence
  synthetic sequence
acctgtaccaccc

SEQ ID NO: 1771 - DNA, 13 bp, Artificial Sequence
  synthetic sequence
cttccgagcggtc

SEQ ID NO: 1772 - DNA, 13 bp, Artificial Sequence
  synthetic sequence
gccgatgtcatcc

SEQ ID NO: 1773 - DNA, 13 bp, Artificial Sequence
  synthetic sequence
gttgttccatgtc

SEQ ID NO: 1774 - DNA, 13 bp, Artificial Sequence
  synthetic sequence
tccacttatggca

SEQ ID NO: 1775 - DNA, 13 bp, Artificial Sequence
  synthetic sequence
gcctacgagacct

SEQ ID NO: 1776 - DNA, 13 bp, Artificial Sequence
  synthetic sequence
gcaccaccatcct

SEQ ID NO: 1777 - DNA, 13 bp, Artificial Sequence
  synthetic sequence
ggacgcaagccgg

SEQ ID NO: 1778 - DNA, 13 bp, Artificial Sequence
  synthetic sequence
agtgggtcaatga

SEQ ID NO: 1779 - DNA, 13 bp, Artificial Sequence
  synthetic sequence
ggatcactgaaga

SEQ ID NO: 1780 - DNA, 13 bp, Artificial Sequence
  synthetic sequence
tcgccgtggagcc

SEQ ID NO: 1781 - DNA, 13 bp, Artificial Sequence
  synthetic sequence
tgcctgcgtgtac

SEQ ID NO: 1782 - DNA, 13 bp, Artificial Sequence
  synthetic sequence
gaggtcaccctca

SEQ ID NO: 1783 - DNA, 13 bp, Artificial Sequence
  synthetic sequence
tcagcctggaccc

SEQ ID NO: 1784 - DNA, 13 bp, Artificial Sequence
  synthetic sequence
ctgttcagaatga

SEQ ID NO: 1785 - DNA, 13 bp, Artificial Sequence
  synthetic sequence
agtacctctacgg

SEQ ID NO: 1786 - DNA, 13 bp, Artificial Sequence
  synthetic sequence
tccacccagagct

SEQ ID NO: 1787 - DNA, 13 bp, Artificial Sequence
  synthetic sequence
gtcgtctgctgct

SEQ ID NO: 1788 - DNA, 13 bp, Artificial Sequence
  synthetic sequence
tgcatttgcctgg

SEQ ID NO: 1789 - DNA, 13 bp, Artificial Sequence
  synthetic sequence
ccatagagaccac

SEQ ID NO: 1790 - DNA, 13 bp, Artificial Sequence
  synthetic sequence
agccttcggcccc

SEQ ID NO: 1791 - DNA, 13 bp, Artificial Sequence
  synthetic sequence
aggactgcaattg

SEQ ID NO: 1792 - DNA, 13 bp, Artificial Sequence
  synthetic sequence
cctccaaagccgc

SEQ ID NO: 1793 - DNA, 13 bp, Artificial Sequence
  synthetic sequence
ccatctttactct

SEQ ID NO: 1794 - DNA, 13 bp, Artificial Sequence
  synthetic sequence
tcaccagcctcac

SEQ ID NO: 1795 - DNA, 13 bp, Artificial Sequence
  synthetic sequence
agtcccgttccac

SEQ ID NO: 1796 - DNA, 13 bp, Artificial Sequence
  synthetic sequence
gggggaggcacct

SEQ ID NO: 1797 - DNA, 13 bp, Artificial Sequence
  synthetic sequence
tctcagaccctgc

SEQ ID NO: 1798 - DNA, 13 bp, Artificial Sequence
  synthetic sequence
aagggtaggtggg

SEQ ID NO: 1799 - DNA, 13 bp, Artificial Sequence
  synthetic sequence
cttcaccatcacc

SEQ ID NO: 1800 - DNA, 13 bp, Artificial Sequence
  synthetic sequence
ttgaccttgtcac

SEQ ID NO: 1801 - DNA, 13 bp, Artificial Sequence
  synthetic sequence
tggggccctatca

SEQ ID NO: 1802 - DNA, 13 bp, Artificial Sequence
  synthetic sequence
agtggatcaacga

SEQ ID NO: 1803 - DNA, 13 bp, Artificial Sequence
  synthetic sequence
gcccctcctgacc

SEQ ID NO: 1804 - DNA, 13 bp, Artificial Sequence
  synthetic sequence
acccggacatgga

SEQ ID NO: 1805 - DNA, 13 bp, Artificial Sequence
  synthetic sequence
ctcagaaagcttg

SEQ ID NO: 1806 - DNA, 13 bp, Artificial Sequence
  synthetic sequence
ctagcgacggact

SEQ ID NO: 1807 - DNA, 13 bp, Artificial Sequence
  synthetic sequence
cctggatgcgtcc

SEQ ID NO: 1808 - DNA, 13 bp, Artificial Sequence
  synthetic sequence
ccaggtcccttct

SEQ ID NO: 1809 - DNA, 13 bp, Artificial Sequence
  synthetic sequence
acaccaccggggg

SEQ ID NO: 1810 - DNA, 13 bp, Artificial Sequence
  synthetic sequence
cgcatcgggtggg

SEQ ID NO: 1811 - DNA, 13 bp, Artificial Sequence
  synthetic sequence
gctcgccttatcg

SEQ ID NO: 1812 - DNA, 13 bp, Artificial Sequence
  synthetic sequence
accaagtggaggg

SEQ ID NO: 1813 - DNA, 13 bp, Artificial Sequence
  synthetic sequence
tacatcgaacagg

SEQ ID NO: 1814 - DNA, 13 bp, Artificial Sequence
  synthetic sequence
gccgcgacaaaaa

SEQ ID NO: 1815 - DNA, 13 bp, Artificial Sequence
  synthetic sequence
aaggagattaagg

SEQ ID NO: 1816 - DNA, 13 bp, Artificial Sequence
  synthetic sequence
atgtcttcctgct

SEQ ID NO: 1817 - DNA, 13 bp, Artificial Sequence
  synthetic sequence
gaggagtccatat

SEQ ID NO: 1818 - DNA, 13 bp, Artificial Sequence
  synthetic sequence
gcaccatgctggt

SEQ ID NO: 1819 - DNA, 13 bp, Artificial Sequence
  synthetic sequence
tgtcaagaccatc

SEQ ID NO: 1820 - DNA, 13 bp, Artificial Sequence
  synthetic sequence
aggaacatgtgga

SEQ ID NO: 1821 - DNA, 13 bp, Artificial Sequence
  synthetic sequence
tcactagcccgct

SEQ ID NO: 1822 - DNA, 13 bp, Artificial Sequence
  synthetic sequence
caccagctgtgcc

SEQ ID NO: 1823 - DNA, 13 bp, Artificial Sequence
  synthetic sequence
actacaatccacc

SEQ ID NO: 1824 - DNA, 13 bp, Artificial Sequence
  synthetic sequence
tgtcaagaccacc

SEQ ID NO: 1825 - DNA, 13 bp, Artificial Sequence
  synthetic sequence
aacaccaggccac

SEQ ID NO: 1826 - DNA, 13 bp, Artificial Sequence
  synthetic sequence
gtacatccccgtc

SEQ ID NO: 1827 - DNA, 13 bp, Artificial Sequence
  synthetic sequence
gcttgggaaacag

SEQ ID NO: 1828 - DNA, 13 bp, Artificial Sequence
  synthetic sequence
ggccacgtactct

SEQ ID NO: 1829 - DNA, 13 bp, Artificial Sequence
  synthetic sequence
agacctatcaggt

SEQ ID NO: 1830 - DNA, 13 bp, Artificial Sequence
  synthetic sequence
ggctttggcacta

SEQ ID NO: 1831 - DNA, 13 bp, Artificial Sequence
  synthetic sequence
gtacatccctgtc

SEQ ID NO: 1832 - DNA, 13 bp, Artificial Sequence
  synthetic sequence
tctatcagtgttg

SEQ ID NO: 1833 - DNA, 13 bp, Artificial Sequence
  synthetic sequence
ccatgaggatcgt

SEQ ID NO: 1834 - DNA, 13 bp, Artificial Sequence
  synthetic sequence
cggattacaaccc

SEQ ID NO: 1835 - DNA, 13 bp, Artificial Sequence
  synthetic sequence
tcactagcctcac

SEQ ID NO: 1836 - DNA, 13 bp, Artificial Sequence
  synthetic sequence
tcacgaaatggtt

SEQ ID NO: 1837 - DNA, 13 bp, Artificial Sequence
  synthetic sequence
tgtctcctggcgc

SEQ ID NO: 1838 - DNA, 13 bp, Artificial Sequence
  synthetic sequence
ggctctggcatta

SEQ ID NO: 1839 - DNA, 13 bp, Artificial Sequence
  synthetic sequence
acctgcatgaaca

SEQ ID NO: 1840 - DNA, 13 bp, Artificial Sequence
  synthetic sequence
gtcgttatctgcg

SEQ ID NO: 1841 - DNA, 13 bp, Artificial Sequence
  synthetic sequence
ctgattacaaccc

SEQ ID NO: 1842 - DNA, 13 bp, Artificial Sequence
  synthetic sequence
tcaccagcccact

SEQ ID NO: 1843 - DNA, 13 bp, Artificial Sequence
  synthetic sequence
gccaggaccacct

SEQ ID NO: 1844 - DNA, 13 bp, Artificial Sequence
  synthetic sequence
ctgacaattcaac

SEQ ID NO: 1845 - DNA, 13 bp, Artificial Sequence
  synthetic sequence
aggcaacatgcac

SEQ ID NO: 1846 - DNA, 13 bp, Artificial Sequence
  synthetic sequence
tcaagggagggag

SEQ ID NO: 1847 - DNA, 13 bp, Artificial Sequence
  synthetic sequence
acatcaaaggggg

SEQ ID NO: 1848 - DNA, 13 bp, Artificial Sequence
  synthetic sequence
caggggtggggtc

SEQ ID NO: 1849 - DNA, 13 bp, Artificial Sequence
  synthetic sequence
atgaagtgacact

SEQ ID NO: 1850 - DNA, 13 bp, Artificial Sequence
  synthetic sequence
agacatctcatct

SEQ ID NO: 1851 - DNA, 13 bp, Artificial Sequence
  synthetic sequence
ctgacgagactgc

SEQ ID NO: 1852 - DNA, 13 bp, Artificial Sequence
  synthetic sequence
agcaacacctggc

SEQ ID NO: 1853 - DNA, 13 bp, Artificial Sequence
  synthetic sequence
actccacgtatgg

SEQ ID NO: 1854 - DNA, 13 bp, Artificial Sequence
  synthetic sequence
gagtgctctcagc

SEQ ID NO: 1855 - DNA, 13 bp, Artificial Sequence
  synthetic sequence
ttcagcctagacc

SEQ ID NO: 1856 - DNA, 13 bp, Artificial Sequence
  synthetic sequence
tctgctgctctat

SEQ ID NO: 1857 - DNA, 13 bp, Artificial Sequence
  synthetic sequence
ccggactacaatc

SEQ ID NO: 1858 - DNA, 13 bp, Artificial Sequence
  synthetic sequence
ttcactgacaact

SEQ ID NO: 1859 - DNA, 13 bp, Artificial Sequence
  synthetic sequence
attccacctatgg

SEQ ID NO: 1860 - DNA, 13 bp, Artificial Sequence
  synthetic sequence
agaacattgtgga

SEQ ID NO: 1861 - DNA, 13 bp, Artificial Sequence
  synthetic sequence
gagcggtcccagc

SEQ ID NO: 1862 - DNA, 13 bp, Artificial Sequence
  synthetic sequence
gaacgatcccagc

SEQ ID NO: 1863 - DNA, 13 bp, Artificial Sequence
  synthetic sequence
tgaaggccacttg

SEQ ID NO: 1864 - DNA, 13 bp, Artificial Sequence
  synthetic sequence
tcatctcagaaag

SEQ ID NO: 1865 - DNA, 13 bp, Artificial Sequence
  synthetic sequence
gatgtgttcctgc

SEQ ID NO: 1866 - DNA, 13 bp, Artificial Sequence
  synthetic sequence
gctgttccatgtc

SEQ ID NO: 1867 - DNA, 13 bp, Artificial Sequence
  synthetic sequence
tctgcggagatga

SEQ ID NO: 1868 - DNA, 13 bp, Artificial Sequence
  synthetic sequence
attccacctacgg

SEQ ID NO: 1869 - DNA, 13 bp, Artificial Sequence
  synthetic sequence
cgcaagcccgctc

SEQ ID NO: 1870 - DNA, 13 bp, Artificial Sequence
  synthetic sequence
ccgatgtcattcc

SEQ ID NO: 1871 - DNA, 13 bp, Artificial Sequence
  synthetic sequence
tgaagggtaagtg

SEQ ID NO: 1872 - DNA, 13 bp, Artificial Sequence
  synthetic sequence
cagaatgagatca

SEQ ID NO: 1873 - DNA, 13 bp, Artificial Sequence
  synthetic sequence
cccatatgggcac

SEQ ID NO: 1874 - DNA, 13 bp, Artificial Sequence
  synthetic sequence
actcctggttggg

SEQ ID NO: 1875 - DNA, 13 bp, Artificial Sequence
  synthetic sequence
actccacgtacgg

SEQ ID NO: 1876 - DNA, 13 bp, Artificial Sequence
  synthetic sequence
agcctcactggca

SEQ ID NO: 1877 - DNA, 13 bp, Artificial Sequence
  synthetic sequence
accttgcggtggc

SEQ ID NO: 1878 - DNA, 13 bp, Artificial Sequence
  synthetic sequence
ggctatggcacta

SEQ ID NO: 1879 - DNA, 13 bp, Artificial Sequence
  synthetic sequence
cttctggctgccc

SEQ ID NO: 1880 - DNA, 13 bp, Artificial Sequence
  synthetic sequence
ggtgcgtcccgtg

SEQ ID NO: 1881 - DNA, 13 bp, Artificial Sequence
  synthetic sequence
cgtctccggggga

SEQ ID NO: 1882 - DNA, 13 bp, Artificial Sequence
  synthetic sequence
catgagtggatca

SEQ ID NO: 1883 - DNA, 13 bp, Artificial Sequence
  synthetic sequence
aggcatctcattt

SEQ ID NO: 1884 - DNA, 13 bp, Artificial Sequence
  synthetic sequence
ccatactatcgcc

SEQ ID NO: 1885 - DNA, 13 bp, Artificial Sequence
  synthetic sequence
gctccggcgtgca

SEQ ID NO: 1886 - DNA, 13 bp, Artificial Sequence
  synthetic sequence
ctgtccaaaatga

SEQ ID NO: 1887 - DNA, 13 bp, Artificial Sequence
  synthetic sequence
aggagcgagcgtc

SEQ ID NO: 1888 - DNA, 13 bp, Artificial Sequence
  synthetic sequence
ctgcctgggaaac

SEQ ID NO: 1889 - DNA, 13 bp, Artificial Sequence
  synthetic sequence
ggggcagacacct

SEQ ID NO: 1890 - DNA, 13 bp, Artificial Sequence
  synthetic sequence
aggcatctcatct

SEQ ID NO: 1891 - DNA, 13 bp, Artificial Sequence
  synthetic sequence
gagccagtcgtct

SEQ ID NO: 1892 - DNA, 13 bp, Artificial Sequence
  synthetic sequence
atagagactacca

SEQ ID NO: 1893 - DNA, 13 bp, Artificial Sequence
  synthetic sequence
cccaccttcacca

SEQ ID NO: 1894 - DNA, 13 bp, Artificial Sequence
  synthetic sequence
tgcctgccatcct

SEQ ID NO: 1895 - DNA, 13 bp, Artificial Sequence
  synthetic sequence
accagtcccctga

SEQ ID NO: 1896 - DNA, 13 bp, Artificial Sequence
  synthetic sequence
cctgcaccaccca

SEQ ID NO: 1897 - DNA, 13 bp, Artificial Sequence
  synthetic sequence
tgaacagcacccg

SEQ ID NO: 1898 - DNA, 13 bp, Artificial Sequence
  synthetic sequence
aacatgtggcacg

SEQ ID NO: 1899 - DNA, 13 bp, Artificial Sequence
  synthetic sequence
gtcacggagcgcg

SEQ ID NO: 1900 - DNA, 13 bp, Artificial Sequence
  synthetic sequence
tggggtcctatca

SEQ ID NO: 1901 - DNA, 13 bp, Artificial Sequence
  synthetic sequence
gtgtgtcaggacc

SEQ ID NO: 1902 - DNA, 13 bp, Artificial Sequence
  synthetic sequence
aggaggttaaggc

SEQ ID NO: 1903 - DNA, 13 bp, Artificial Sequence
  synthetic sequence
tgtacccaggcca

SEQ ID NO: 1904 - DNA, 13 bp, Artificial Sequence
  synthetic sequence
aaggagatcaagg

SEQ ID NO: 1905 - DNA, 13 bp, Artificial Sequence
  synthetic sequence
gtcactgaacagg

SEQ ID NO: 1906 - DNA, 13 bp, Artificial Sequence
  synthetic sequence
agcctcaccggca

SEQ ID NO: 1907 - DNA, 13 bp, Artificial Sequence
  synthetic sequence
caaaccctcctct

SEQ ID NO: 1908 - DNA, 13 bp, Artificial Sequence
  synthetic sequence
accaatgctgtga

SEQ ID NO: 1909 - DNA, 13 bp, Artificial Sequence
  synthetic sequence
gggtgcgtaccct

SEQ ID NO: 1910 - DNA, 13 bp, Artificial Sequence
  synthetic sequence
tacgcccctccat

SEQ ID NO: 1911 - DNA, 13 bp, Artificial Sequence
  synthetic sequence
catgctccggctc

SEQ ID NO: 1912 - DNA, 13 bp, Artificial Sequence
  synthetic sequence
gtcgtcatctgtg

SEQ ID NO: 1913 - DNA, 13 bp, Artificial Sequence
  synthetic sequence
cagggttggggcc

SEQ ID NO: 1914 - DNA, 13 bp, Artificial Sequence
  synthetic sequence
gctcgtctcatcg

SEQ ID NO: 1915 - DNA, 13 bp, Artificial Sequence
  synthetic sequence
atgctgatgtcat

SEQ ID NO: 1916 - DNA, 13 bp, Artificial Sequence
  synthetic sequence
cttacatcgagca

SEQ ID NO: 1917 - DNA, 13 bp, Artificial Sequence
  synthetic sequence
ctgaggactgccc

SEQ ID NO: 1918 - DNA, 13 bp, Artificial Sequence
  synthetic sequence
ccactagtcgagc

SEQ ID NO: 1919 - DNA, 13 bp, Artificial Sequence
  synthetic sequence
gccaagatcatct

SEQ ID NO: 1920 - DNA, 13 bp, Artificial Sequence
  synthetic sequence
gggggagacacct

SEQ ID NO: 1921 - DNA, 13 bp, Artificial Sequence
  synthetic sequence
tgcaactgttcta

SEQ ID NO: 1922 - DNA, 13 bp, Artificial Sequence
  synthetic sequence
gttgctccatgtc

SEQ ID NO: 1923 - DNA, 13 bp, Artificial Sequence
  synthetic sequence
agtaacacctggc

SEQ ID NO: 1924 - DNA, 13 bp, Artificial Sequence
  synthetic sequence
gtaccgcagacat

SEQ ID NO: 1925 - DNA, 13 bp, Artificial Sequence
  synthetic sequence
tgggtgccgtgac

SEQ ID NO: 1926 - DNA, 13 bp, Artificial Sequence
  synthetic sequence
ggtccaccgtcag

SEQ ID NO: 1927 - DNA, 13 bp, Artificial Sequence
  synthetic sequence
tggaattttggga

SEQ ID NO: 1928 - DNA, 13 bp, Artificial Sequence
  synthetic sequence
acaacatcctctg

SEQ ID NO: 1929 - DNA, 13 bp, Artificial Sequence
  synthetic sequence
ggcatgcagacgt

SEQ ID NO: 1930 - DNA, 13 bp, Artificial Sequence
  synthetic sequence
gcgtgccctgcgt

SEQ ID NO: 1931 - DNA, 13 bp, Artificial Sequence
  synthetic sequence
cacgagtggatca

SEQ ID NO: 1932 - DNA, 13 bp, Artificial Sequence
  synthetic sequence
gtcaccgggggaa

SEQ ID NO: 1933 - DNA, 13 bp, Artificial Sequence
  synthetic sequence
caaagccgttttt

SEQ ID NO: 1934 - DNA, 13 bp, Artificial Sequence
  synthetic sequence
cggacgtgctgct

SEQ ID NO: 1935 - DNA, 13 bp, Artificial Sequence
  synthetic sequence
tcaccagccttac

SEQ ID NO: 1936 - DNA, 13 bp, Artificial Sequence
  synthetic sequence
aacaaaccctcct

SEQ ID NO: 1937 - DNA, 13 bp, Artificial Sequence
  synthetic sequence
ggtccacagtcag

SEQ ID NO: 1938 - DNA, 13 bp, Artificial Sequence
  synthetic sequence
aaccggagaaggg

SEQ ID NO: 1939 - DNA, 13 bp, Artificial Sequence
  synthetic sequence
gccactgaacctg

SEQ ID NO: 1940 - DNA, 13 bp, Artificial Sequence
  synthetic sequence
aaggccacatgca

SEQ ID NO: 1941 - DNA, 13 bp, Artificial Sequence
  synthetic sequence
agccagcccgcct

SEQ ID NO: 1942 - DNA, 13 bp, Artificial Sequence
  synthetic sequence
gggcggcatatgc

SEQ ID NO: 1943 - DNA, 13 bp, Artificial Sequence
  synthetic sequence
cgctggtgaccta

SEQ ID NO: 1944 - DNA, 13 bp, Artificial Sequence
  synthetic sequence
gtacatacccgtc

SEQ ID NO: 1945 - DNA, 13 bp, Artificial Sequence
  synthetic sequence
cacccaatcacca

SEQ ID NO: 1946 - DNA, 13 bp, Artificial Sequence
  synthetic sequence
tggtgaccggtga

SEQ ID NO: 1947 - DNA, 13 bp, Artificial Sequence
  synthetic sequence
acatctggcacgg

SEQ ID NO: 1948 - DNA, 13 bp, Artificial Sequence
  synthetic sequence
tgtaactgttcca

SEQ ID NO: 1949 - DNA, 13 bp, Artificial Sequence
  synthetic sequence
acatcaaaggccg

SEQ ID NO: 1950 - DNA, 13 bp, Artificial Sequence
  synthetic sequence
tggtcgacggtca

SEQ ID NO: 1951 - DNA, 13 bp, Artificial Sequence
  synthetic sequence
agtcttaaaggac

SEQ ID NO: 1952 - DNA, 13 bp, Artificial Sequence
  synthetic sequence
gcaatgtctggca

SEQ ID NO: 1953 - DNA, 13 bp, Artificial Sequence
  synthetic sequence
cctggatgtgtcc

SEQ ID NO: 1954 - DNA, 13 bp, Artificial Sequence
  synthetic sequence
tcagtttggaccc

SEQ ID NO: 1955 - DNA, 13 bp, Artificial Sequence
  synthetic sequence
ttgactttagcct

SEQ ID NO: 1956 - DNA, 13 bp, Artificial Sequence
  synthetic sequence
cctaccaggtggg

SEQ ID NO: 1957 - DNA, 13 bp, Artificial Sequence
  synthetic sequence
gagcccgtcatct

SEQ ID NO: 1958 - DNA, 13 bp, Artificial Sequence
  synthetic sequence
caccccataacca

SEQ ID NO: 1959 - DNA, 13 bp, Artificial Sequence
  synthetic sequence
tgcacaggtatgc

SEQ ID NO: 1960 - DNA, 13 bp, Artificial Sequence
  synthetic sequence
tggtcgacggtta

SEQ ID NO: 1961 - DNA, 13 bp, Artificial Sequence
  synthetic sequence
acgtccagtacct

SEQ ID NO: 1962 - DNA, 13 bp, Artificial Sequence
  synthetic sequence
actctacctatgg

SEQ ID NO: 1963 - DNA, 13 bp, Artificial Sequence
  synthetic sequence
acaagacccccgc

SEQ ID NO: 1964 - DNA, 13 bp, Artificial Sequence
  synthetic sequence
attacaatccacc

SEQ ID NO: 1965 - DNA, 13 bp, Artificial Sequence
  synthetic sequence
ggataggatgggg

SEQ ID NO: 1966 - DNA, 13 bp, Artificial Sequence
  synthetic sequence
gaacaagctcagg

SEQ ID NO: 1967 - DNA, 13 bp, Artificial Sequence
  synthetic sequence
acatcagggtcga

SEQ ID NO: 1968 - DNA, 13 bp, Artificial Sequence
  synthetic sequence
gcaaacccttgct

SEQ ID NO: 1969 - DNA, 13 bp, Artificial Sequence
  synthetic sequence
ccagcccattaac

SEQ ID NO: 1970 - DNA, 13 bp, Artificial Sequence
  synthetic sequence
gatgtccaatacc

SEQ ID NO: 1971 - DNA, 13 bp, Artificial Sequence
  synthetic sequence
acgtcactggggg

SEQ ID NO: 1972 - DNA, 13 bp, Artificial Sequence
  synthetic sequence
gactgcaactgct

SEQ ID NO: 1973 - DNA, 13 bp, Artificial Sequence
  synthetic sequence
gacatctaccaat

SEQ ID NO: 1974 - DNA, 13 bp, Artificial Sequence
  synthetic sequence
cacagtccagcac

SEQ ID NO: 1975 - DNA, 13 bp, Artificial Sequence
  synthetic sequence
tggagttttggga

SEQ ID NO: 1976 - DNA, 13 bp, Artificial Sequence
  synthetic sequence
gaagaggggcagc

SEQ ID NO: 1977 - DNA, 13 bp, Artificial Sequence
  synthetic sequence
atgactccccaga

SEQ ID NO: 1978 - DNA, 13 bp, Artificial Sequence
  synthetic sequence
ttaccagcccgct

SEQ ID NO: 1979 - DNA, 13 bp, Artificial Sequence
  synthetic sequence
agtggtgagcatg

SEQ ID NO: 1980 - DNA, 13 bp, Artificial Sequence
  synthetic sequence
agtaccaccatcc

SEQ ID NO: 1981 - DNA, 13 bp, Artificial Sequence
  synthetic sequence
aaggagatgaagg

SEQ ID NO: 1982 - DNA, 13 bp, Artificial Sequence
  synthetic sequence
tcaacctgctgcc

SEQ ID NO: 1983 - DNA, 13 bp, Artificial Sequence
  synthetic sequence
ctgaccttgtcac

SEQ ID NO: 1984 - DNA, 13 bp, Artificial Sequence
  synthetic sequence
aaggagatcaagc

SEQ ID NO: 1985 - DNA, 13 bp, Artificial Sequence
  synthetic sequence
ttcatcaaggggg

SEQ ID NO: 1986 - DNA, 13 bp, Artificial Sequence
  synthetic sequence
tcaacttgctccc

SEQ ID NO: 1987 - DNA, 13 bp, Artificial Sequence
  synthetic sequence
ccaccagcagtgc

SEQ ID NO: 1988 - DNA, 13 bp, Artificial Sequence
  synthetic sequence
tcacccgaaacgc

SEQ ID NO: 1989 - DNA, 13 bp, Artificial Sequence
  synthetic sequence
gtgaggacgtcgt

SEQ ID NO: 1990 - DNA, 13 bp, Artificial Sequence
  synthetic sequence
gcttctttacctt

SEQ ID NO: 1991 - DNA, 13 bp, Artificial Sequence
  synthetic sequence
cagggatggggcc

SEQ ID NO: 1992 - DNA, 13 bp, Artificial Sequence
  synthetic sequence
gctgcgtgggaaa

SEQ ID NO: 1993 - DNA, 13 bp, Artificial Sequence
  synthetic sequence
accaaggctgggg

SEQ ID NO: 1994 - DNA, 13 bp, Artificial Sequence
  synthetic sequence
cacactccagtga

SEQ ID NO: 1995 - DNA, 13 bp, Artificial Sequence
  synthetic sequence
tgcaaaatgaggt

SEQ ID NO: 1996 - DNA, 13 bp, Artificial Sequence
  synthetic sequence
actctacttatgg

SEQ ID NO: 1997 - DNA, 13 bp, Artificial Sequence
  synthetic sequence
gcccagggtttgc

SEQ ID NO: 1998 - DNA, 13 bp, Artificial Sequence
  synthetic sequence
tgaccagtcctct

SEQ ID NO: 1999 - DNA, 13 bp, Artificial Sequence
  synthetic sequence
cttaccaggtggg

SEQ ID NO: 2000 - DNA, 13 bp, Artificial Sequence
  synthetic sequence
ttcagtttagacc

SEQ ID NO: 2001 - DNA, 13 bp, Artificial Sequence
  synthetic sequence
tccttaacaacac

SEQ ID NO: 2002 - DNA, 13 bp, Artificial Sequence
  synthetic sequence
cccacgtgacagg

SEQ ID NO: 2003 - DNA, 13 bp, Artificial Sequence
  synthetic sequence
tgttcttgtcggg

SEQ ID NO: 2004 - DNA, 13 bp, Artificial Sequence
  synthetic sequence
agtgctctaagca

SEQ ID NO: 2005 - DNA, 13 bp, Artificial Sequence
  synthetic sequence
acatcaagggtcg

SEQ ID NO: 2006 - DNA, 13 bp, Artificial Sequence
  synthetic sequence
gccagtcattttc

SEQ ID NO: 2007 - DNA, 13 bp, Artificial Sequence
  synthetic sequence
aatacctgtacgg

SEQ ID NO: 2008 - DNA, 13 bp, Artificial Sequence
  synthetic sequence
cccccttgcaagc

SEQ ID NO: 2009 - DNA, 13 bp, Artificial Sequence
  synthetic sequence
aacacttggcacg

SEQ ID NO: 2010 - DNA, 13 bp, Artificial Sequence
  synthetic sequence
acgacttagtcgt

SEQ ID NO: 2011 - DNA, 13 bp, Artificial Sequence
  synthetic sequence
agaacatagtgga

SEQ ID NO: 2012 - DNA, 13 bp, Artificial Sequence
  synthetic sequence
aggacatggtgaa

SEQ ID NO: 2013 - DNA, 13 bp, Artificial Sequence
  synthetic sequence
aaggagataaagg

SEQ ID NO: 2014 - DNA, 13 bp, Artificial Sequence
  synthetic sequence
acagcggcacagc

SEQ ID NO: 2015 - DNA, 13 bp, Artificial Sequence
  synthetic sequence
taccttgtgttca

SEQ ID NO: 2016 - DNA, 13 bp, Artificial Sequence
  synthetic sequence
gcaccactatcct

SEQ ID NO: 2017 - DNA, 13 bp, Artificial Sequence
  synthetic sequence
tgcgtcccttgcg

SEQ ID NO: 2018 - DNA, 13 bp, Artificial Sequence
  synthetic sequence
cggtcagtgagga

SEQ ID NO: 2019 - DNA, 13 bp, Artificial Sequence
  synthetic sequence
aaacctatcaggt

SEQ ID NO: 2020 - DNA, 13 bp, Artificial Sequence
  synthetic sequence
tctggcatggcac

SEQ ID NO: 2021 - DNA, 13 bp, Artificial Sequence
  synthetic sequence
caacagaccctcc

SEQ ID NO: 2022 - DNA, 13 bp, Artificial Sequence
  synthetic sequence
tcagtctggaccc

SEQ ID NO: 2023 - DNA, 13 bp, Artificial Sequence
  synthetic sequence
tcaccatcttcac

SEQ ID NO: 2024 - DNA, 13 bp, Artificial Sequence
  synthetic sequence
aggtggagggtga

SEQ ID NO: 2025 - DNA, 13 bp, Artificial Sequence
  synthetic sequence
aactactgtcttc

SEQ ID NO: 2026 - DNA, 13 bp, Artificial Sequence
  synthetic sequence
ccccaactgagac

SEQ ID NO: 2027 - DNA, 13 bp, Artificial Sequence
  synthetic sequence
tgtgccaggatca

SEQ ID NO: 2028 - DNA, 13 bp, Artificial Sequence
  synthetic sequence
gtgtgccctgtgt

SEQ ID NO: 2029 - DNA, 13 bp, Artificial Sequence
  synthetic sequence
aaggctacttgca

SEQ ID NO: 2030 - DNA, 13 bp, Artificial Sequence
  synthetic sequence
ggctctggcacta

SEQ ID NO: 2031 - DNA, 13 bp, Artificial Sequence
  synthetic sequence
gtacatcccagtc

SEQ ID NO: 2032 - DNA, 13 bp, Artificial Sequence
  synthetic sequence
ttcagcctggatc

SEQ ID NO: 2033 - DNA, 13 bp, Artificial Sequence
  synthetic sequence
gcctacgagatct

SEQ ID NO: 2034 - DNA, 13 bp, Artificial Sequence
  synthetic sequence
atgtccttaagga

SEQ ID NO: 2035 - DNA, 13 bp, Artificial Sequence
  synthetic sequence
gctgacgtcatcc

SEQ ID NO: 2036 - DNA, 13 bp, Artificial Sequence
  synthetic sequence
caggactgtaact

SEQ ID NO: 2037 - DNA, 13 bp, Artificial Sequence
  synthetic sequence
ccttgtgtttgag

SEQ ID NO: 2038 - DNA, 13 bp, Artificial Sequence
  synthetic sequence
acgtgttcctgct

SEQ ID NO: 2039 - DNA, 13 bp, Artificial Sequence
  synthetic sequence
ctgatgtcttcct

SEQ ID NO: 2040 - DNA, 13 bp, Artificial Sequence
  synthetic sequence
ccatgtgagaatg

SEQ ID NO: 2041 - DNA, 13 bp, Artificial Sequence
  synthetic sequence
gtacattccgctc

SEQ ID NO: 2042 - DNA, 13 bp, Artificial Sequence
  synthetic sequence
tgaccacccagca

SEQ ID NO: 2043 - DNA, 13 bp, Artificial Sequence
  synthetic sequence
gaccagggctggg

SEQ ID NO: 2044 - DNA, 13 bp, Artificial Sequence
  synthetic sequence
acctgcttgttac

SEQ ID NO: 2045 - DNA, 13 bp, Artificial Sequence
  synthetic sequence
tggtgagtatgac

SEQ ID NO: 2046 - DNA, 13 bp, Artificial Sequence
  synthetic sequence
aagactgcaattg

SEQ ID NO: 2047 - DNA, 13 bp, Artificial Sequence
  synthetic sequence
ttgagacaaccac

SEQ ID NO: 2048 - DNA, 13 bp, Artificial Sequence
  synthetic sequence
ggccggaagccag

SEQ ID NO: 2049 - DNA, 13 bp, Artificial Sequence
  synthetic sequence
cagaatatcgtgg

SEQ ID NO: 2050 - DNA, 13 bp, Artificial Sequence
  synthetic sequence
aggatgtcgtcaa

SEQ ID NO: 2051 - DNA, 13 bp, Artificial Sequence
  synthetic sequence
acagcgtccagca

SEQ ID NO: 2052 - DNA, 13 bp, Artificial Sequence
  synthetic sequence
ggtcgaaggggag

SEQ ID NO: 2053 - DNA, 13 bp, Artificial Sequence
  synthetic sequence
tgtgtgccctgcg

SEQ ID NO: 2054 - DNA, 13 bp, Artificial Sequence
  synthetic sequence
tggatcactgagg

SEQ ID NO: 2055 - DNA, 13 bp, Artificial Sequence
  synthetic sequence
tcttcacactcac

SEQ ID NO: 2056 - DNA, 13 bp, Artificial Sequence
  synthetic sequence
tcgcccccactcc

SEQ ID NO: 2057 - DNA, 13 bp, Artificial Sequence
  synthetic sequence
gcctacgggacct

SEQ ID NO: 2058 - DNA, 13 bp, Artificial Sequence
  synthetic sequence
gccgcgacaagaa

SEQ ID NO: 2059 - DNA, 13 bp, Artificial Sequence
  synthetic sequence
gctgagggccagc

SEQ ID NO: 2060 - DNA, 13 bp, Artificial Sequence
  synthetic sequence
tccttgaaagcca

SEQ ID NO: 2061 - DNA, 13 bp, Artificial Sequence
  synthetic sequence
aacccatccaata

SEQ ID NO: 2062 - DNA, 13 bp, Artificial Sequence
  synthetic sequence
tgcagaacgaggt

SEQ ID NO: 2063 - DNA, 13 bp, Artificial Sequence
  synthetic sequence
accaaggttgggg

SEQ ID NO: 2064 - DNA, 13 bp, Artificial Sequence
  synthetic sequence
cacatcctgtgac

SEQ ID NO: 2065 - DNA, 13 bp, Artificial Sequence
  synthetic sequence
ctgagcatgacat

SEQ ID NO: 2066 - DNA, 13 bp, Artificial Sequence
  synthetic sequence
catcaagggtagg

SEQ ID NO: 2067 - DNA, 13 bp, Artificial Sequence
  synthetic sequence
actcgaccaggcc

SEQ ID NO: 2068 - DNA, 13 bp, Artificial Sequence
  synthetic sequence
gacctagcggtgg

SEQ ID NO: 2069 - DNA, 13 bp, Artificial Sequence
  synthetic sequence
gcttgcgagatct

SEQ ID NO: 2070 - DNA, 13 bp, Artificial Sequence
  synthetic sequence
gctcgtctgatcg

SEQ ID NO: 2071 - DNA, 13 bp, Artificial Sequence
  synthetic sequence
atgttggtttgcg

SEQ ID NO: 2072 - DNA, 13 bp, Artificial Sequence
  synthetic sequence
gggggtcgcaagc

SEQ ID NO: 2073 - DNA, 13 bp, Artificial Sequence
  synthetic sequence
acatcaaaggcag

SEQ ID NO: 2074 - DNA, 13 bp, Artificial Sequence
  synthetic sequence
tttacactcaccc

SEQ ID NO: 2075 - DNA, 13 bp, Artificial Sequence
  synthetic sequence
cggattataaccc

SEQ ID NO: 2076 - DNA, 13 bp, Artificial Sequence
  synthetic sequence
tttgagatcacca

SEQ ID NO: 2077 - DNA, 13 bp, Artificial Sequence
  synthetic sequence
ggagacgaccttg

SEQ ID NO: 2078 - DNA, 13 bp, Artificial Sequence
  synthetic sequence
ggggtagacacct

SEQ ID NO: 2079 - DNA, 13 bp, Artificial Sequence
  synthetic sequence
ggcaagttcctcg

SEQ ID NO: 2080 - DNA, 13 bp, Artificial Sequence
  synthetic sequence
cggtgcagaatga

SEQ ID NO: 2081 - DNA, 13 bp, Artificial Sequence
  synthetic sequence
cctgatgctgagc

SEQ ID NO: 2082 - DNA, 13 bp, Artificial Sequence
  synthetic sequence
ggccagattacaa

SEQ ID NO: 2083 - DNA, 13 bp, Artificial Sequence
  synthetic sequence
ggccgagacaaga

SEQ ID NO: 2084 - DNA, 13 bp, Artificial Sequence
  synthetic sequence
ctagcggcctgcg

SEQ ID NO: 2085 - DNA, 13 bp, Artificial Sequence
  synthetic sequence
ggaagttcctggc

SEQ ID NO: 2086 - DNA, 13 bp, Artificial Sequence
  synthetic sequence
cgcaaaccagcgc

SEQ ID NO: 2087 - DNA, 13 bp, Artificial Sequence
  synthetic sequence
ccattctatcgcc

SEQ ID NO: 2088 - DNA, 13 bp, Artificial Sequence
  synthetic sequence
tgcgcgacctcgc

SEQ ID NO: 2089 - DNA, 13 bp, Artificial Sequence
  synthetic sequence
tgcgtgccctgtg

SEQ ID NO: 2090 - DNA, 13 bp, Artificial Sequence
  synthetic sequence
catgactcccctg

SEQ ID NO: 2091 - DNA, 13 bp, Artificial Sequence
  synthetic sequence
tcctgcctgctat

SEQ ID NO: 2092 - DNA, 13 bp, Artificial Sequence
  synthetic sequence
ccacaaccctcct

SEQ ID NO: 2093 - DNA, 13 bp, Artificial Sequence
  synthetic sequence
gggaaccttggaa

SEQ ID NO: 2094 - DNA, 13 bp, Artificial Sequence
  synthetic sequence
tgctggtgtgtgg

SEQ ID NO: 2095 - DNA, 13 bp, Artificial Sequence
  synthetic sequence
catgactccccgg

SEQ ID NO: 2096 - DNA, 13 bp, Artificial Sequence
  synthetic sequence
caccccgtgacca

SEQ ID NO: 2097 - DNA, 13 bp, Artificial Sequence
  synthetic sequence
tatagactttggc

SEQ ID NO: 2098 - DNA, 13 bp, Artificial Sequence
  synthetic sequence
cagagcgcgacat

SEQ ID NO: 2099 - DNA, 13 bp, Artificial Sequence
  synthetic sequence
accttcctgggtg

SEQ ID NO: 2100 - DNA, 13 bp, Artificial Sequence
  synthetic sequence
gtccaaatccaca

SEQ ID NO: 2101 - DNA, 13 bp, Artificial Sequence
  synthetic sequence
acacatggcatgg

SEQ ID NO: 2102 - DNA, 13 bp, Artificial Sequence
  synthetic sequence
atccgtcgaaggg

SEQ ID NO: 2103 - DNA, 13 bp, Artificial Sequence
  synthetic sequence
ccatacatcgagc

SEQ ID NO: 2104 - DNA, 13 bp, Artificial Sequence
  synthetic sequence
cattgaggaaggg

SEQ ID NO: 2105 - DNA, 13 bp, Artificial Sequence
  synthetic sequence
tggaattctggga

SEQ ID NO: 2106 - DNA, 13 bp, Artificial Sequence
  synthetic sequence
tcgagacatggaa

SEQ ID NO: 2107 - DNA, 13 bp, Artificial Sequence
  synthetic sequence
caacaccggacga

SEQ ID NO: 2108 - DNA, 13 bp, Artificial Sequence
  synthetic sequence
tggagacttggaa

SEQ ID NO: 2109 - DNA, 13 bp, Artificial Sequence
  synthetic sequence
taaagggcagggt

SEQ ID NO: 2110 - DNA, 13 bp, Artificial Sequence
  synthetic sequence
gcttgggagacag

SEQ ID NO: 2111 - DNA, 13 bp, Artificial Sequence
  synthetic sequence
ttgagccagtcat

SEQ ID NO: 2112 - DNA, 13 bp, Artificial Sequence
  synthetic sequence
ttgccttgtgtga

SEQ ID NO: 2113 - DNA, 13 bp, Artificial Sequence
  synthetic sequence
caccccgtaacca

SEQ ID NO: 2114 - DNA, 13 bp, Artificial Sequence
  synthetic sequence
caccaatggatca

SEQ ID NO: 2115 - DNA, 13 bp, Artificial Sequence
  synthetic sequence
tcaatctactgcc

SEQ ID NO: 2116 - DNA, 13 bp, Artificial Sequence
  synthetic sequence
tacatcgctacgc

SEQ ID NO: 2117 - DNA, 13 bp, Artificial Sequence
  synthetic sequence
ccccctctgtctg

SEQ ID NO: 2118 - DNA, 13 bp, Artificial Sequence
  synthetic sequence
gaggacatggtta

SEQ ID NO: 2119 - DNA, 13 bp, Artificial Sequence
  synthetic sequence
tatggcattaccc

SEQ ID NO: 2120 - DNA, 13 bp, Artificial Sequence
  synthetic sequence
ctaacatcagcgg

SEQ ID NO: 2121 - DNA, 13 bp, Artificial Sequence
  synthetic sequence
agtgacctctacc

SEQ ID NO: 2122 - DNA, 13 bp, Artificial Sequence
  synthetic sequence
acatcaagggtgg

SEQ ID NO: 2123 - DNA, 13 bp, Artificial Sequence
  synthetic sequence
acgccctctacgg

SEQ ID NO: 2124 - DNA, 13 bp, Artificial Sequence
  synthetic sequence
caaggcaactggt

SEQ ID NO: 2125 - DNA, 13 bp, Artificial Sequence
  synthetic sequence
gatctggctgtgg

SEQ ID NO: 2126 - DNA, 13 bp, Artificial Sequence
  synthetic sequence
gggggagacatct

SEQ ID NO: 2127 - DNA, 13 bp, Artificial Sequence
  synthetic sequence
ttaccaggcacgc

SEQ ID NO: 2128 - DNA, 13 bp, Artificial Sequence
  synthetic sequence
tacaccgctacgc

SEQ ID NO: 2129 - DNA, 13 bp, Artificial Sequence
  synthetic sequence
tcatcaagggcgg

SEQ ID NO: 2130 - DNA, 13 bp, Artificial Sequence
  synthetic sequence
cataccaggtggg

SEQ ID NO: 2131 - DNA, 13 bp, Artificial Sequence
  synthetic sequence
ctccagtaaactc

SEQ ID NO: 2132 - DNA, 13 bp, Artificial Sequence
  synthetic sequence
gcttacgagatct

SEQ ID NO: 2133 - DNA, 13 bp, Artificial Sequence
  synthetic sequence
tctgcggggatga

SEQ ID NO: 2134 - DNA, 13 bp, Artificial Sequence
  synthetic sequence
gcccggctcatcg

SEQ ID NO: 2135 - DNA, 13 bp, Artificial Sequence
  synthetic sequence
gtctagaccccac

SEQ ID NO: 2136 - DNA, 13 bp, Artificial Sequence
  synthetic sequence
gggggaagacacc

SEQ ID NO: 2137 - DNA, 13 bp, Artificial Sequence
  synthetic sequence
tgcttgttgcacc

SEQ ID NO: 2138 - DNA, 13 bp, Artificial Sequence
  synthetic sequence
gcttgcgagacct

SEQ ID NO: 2139 - DNA, 13 bp, Artificial Sequence
  synthetic sequence
acataccaagtgg

SEQ ID NO: 2140 - DNA, 13 bp, Artificial Sequence
  synthetic sequence
tcaccagccccct

SEQ ID NO: 2141 - DNA, 13 bp, Artificial Sequence
  synthetic sequence
ttaccatcttcac

SEQ ID NO: 2142 - DNA, 13 bp, Artificial Sequence
  synthetic sequence
tacgccttctacg

SEQ ID NO: 2143 - DNA, 13 bp, Artificial Sequence
  synthetic sequence
gatgggggatgtt

SEQ ID NO: 2144 - DNA, 13 bp, Artificial Sequence
  synthetic sequence
tctgcggggacga

SEQ ID NO: 2145 - DNA, 13 bp, Artificial Sequence
  synthetic sequence
tggggcaagcttg

SEQ ID NO: 2146 - DNA, 13 bp, Artificial Sequence
  synthetic sequence
gactctggcatta

SEQ ID NO: 2147 - DNA, 13 bp, Artificial Sequence
  synthetic sequence
atggcaaattcct

SEQ ID NO: 2148 - DNA, 13 bp, Artificial Sequence
  synthetic sequence
ctattcccaaggc

SEQ ID NO: 2149 - DNA, 13 bp, Artificial Sequence
  synthetic sequence
ggtccactgttag

SEQ ID NO: 2150 - DNA, 13 bp, Artificial Sequence
  synthetic sequence
ctgtccagaatga

SEQ ID NO: 2151 - DNA, 13 bp, Artificial Sequence
  synthetic sequence
gggttctttacct

SEQ ID NO: 2152 - DNA, 13 bp, Artificial Sequence
  synthetic sequence
tacatcgttacgc

SEQ ID NO: 2153 - DNA, 13 bp, Artificial Sequence
  synthetic sequence
ctctcaaagcaac

SEQ ID NO: 2154 - DNA, 13 bp, Artificial Sequence
  synthetic sequence
tgttctcaaggag

SEQ ID NO: 2155 - DNA, 13 bp, Artificial Sequence
  synthetic sequence
ggccccctactgg

SEQ ID NO: 2156 - DNA, 13 bp, Artificial Sequence
  synthetic sequence
tataccaccggtg

SEQ ID NO: 2157 - DNA, 13 bp, Artificial Sequence
  synthetic sequence
cttgaaccagtca

SEQ ID NO: 2158 - DNA, 13 bp, Artificial Sequence
  synthetic sequence
ctgaacatgacat

SEQ ID NO: 2159 - DNA, 13 bp, Artificial Sequence
  synthetic sequence
ggaatgcagatgt

SEQ ID NO: 2160 - DNA, 13 bp, Artificial Sequence
  synthetic sequence
ccatcttgacgct

SEQ ID NO: 2161 - DNA, 13 bp, Artificial Sequence
  synthetic sequence
accttccggggtg

SEQ ID NO: 2162 - DNA, 13 bp, Artificial Sequence
  synthetic sequence
ctacctacggcaa

SEQ ID NO: 2163 - DNA, 13 bp, Artificial Sequence
  synthetic sequence
attggacaacacc

SEQ ID NO: 2164 - DNA, 13 bp, Artificial Sequence
  synthetic sequence
gaccagggttggg

SEQ ID NO: 2165 - DNA, 13 bp, Artificial Sequence
  synthetic sequence
tacatcagtgggt

SEQ ID NO: 2166 - DNA, 13 bp, Artificial Sequence
  synthetic sequence
cgagcgacaatac

SEQ ID NO: 2167 - DNA, 13 bp, Artificial Sequence
  synthetic sequence
acaccactggggg

SEQ ID NO: 2168 - DNA, 13 bp, Artificial Sequence
  synthetic sequence
tatccatcttcac

SEQ ID NO: 2169 - DNA, 13 bp, Artificial Sequence
  synthetic sequence
accagcttgacag

SEQ ID NO: 2170 - DNA, 13 bp, Artificial Sequence
  synthetic sequence
gctcgcctcattg

SEQ ID NO: 2171 - DNA, 13 bp, Artificial Sequence
  synthetic sequence
aagacctgcttga

SEQ ID NO: 2172 - DNA, 13 bp, Artificial Sequence
  synthetic sequence
ggcctgcgggatg

SEQ ID NO: 2173 - DNA, 13 bp, Artificial Sequence
  synthetic sequence
aagcaacatgcac

SEQ ID NO: 2174 - DNA, 13 bp, Artificial Sequence
  synthetic sequence
gcgatttagcggt

SEQ ID NO: 2175 - DNA, 13 bp, Artificial Sequence
  synthetic sequence
tgcagcaacgtct

SEQ ID NO: 2176 - DNA, 13 bp, Artificial Sequence
  synthetic sequence
aatacctggcatg

SEQ ID NO: 2177 - DNA, 13 bp, Artificial Sequence
  synthetic sequence
ccttgactagccc

SEQ ID NO: 2178 - DNA, 13 bp, Artificial Sequence
  synthetic sequence
tacaccagtgggt

SEQ ID NO: 2179 - DNA, 13 bp, Artificial Sequence
  synthetic sequence
aggagattaagct

SEQ ID NO: 2180 - DNA, 13 bp, Artificial Sequence
  synthetic sequence
ccagactataacc

SEQ ID NO: 2181 - DNA, 13 bp, Artificial Sequence
  synthetic sequence
ccgacgtgttctt

SEQ ID NO: 2182 - DNA, 13 bp, Artificial Sequence
  synthetic sequence
gaggacatggtaa

SEQ ID NO: 2183 - DNA, 13 bp, Artificial Sequence
  synthetic sequence
atcctgatgcgga

SEQ ID NO: 2184 - DNA, 13 bp, Artificial Sequence
  synthetic sequence
atggcgtgaggat

SEQ ID NO: 2185 - DNA, 13 bp, Artificial Sequence
  synthetic sequence
ccaatttgggctc

SEQ ID NO: 2186 - DNA, 13 bp, Artificial Sequence
  synthetic sequence
tcagcttggatcc

SEQ ID NO: 2187 - DNA, 13 bp, Artificial Sequence
  synthetic sequence
tgaactccaccag

SEQ ID NO: 2188 - DNA, 13 bp, Artificial Sequence
  synthetic sequence
cagtgccccagag

SEQ ID NO: 2189 - DNA, 13 bp, Artificial Sequence
  synthetic sequence
gtgctaacatgtg

SEQ ID NO: 2190 - DNA, 13 bp, Artificial Sequence
  synthetic sequence
acgtccaatacct

SEQ ID NO: 2191 - DNA, 13 bp, Artificial Sequence
  synthetic sequence
cagactacaatcc

SEQ ID NO: 2192 - DNA, 13 bp, Artificial Sequence
  synthetic sequence
atcctctctcctg

SEQ ID NO: 2193 - DNA, 13 bp, Artificial Sequence
  synthetic sequence
attacaatccgcc

SEQ ID NO: 2194 - DNA, 13 bp, Artificial Sequence
  synthetic sequence
ggaatgccgatgt

SEQ ID NO: 2195 - DNA, 13 bp, Artificial Sequence
  synthetic sequence
catatcaagtggg

SEQ ID NO: 2196 - DNA, 13 bp, Artificial Sequence
  synthetic sequence
gtggacgtacaat

SEQ ID NO: 2197 - DNA, 13 bp, Artificial Sequence
  synthetic sequence
gggggaagacatc

SEQ ID NO: 2198 - DNA, 13 bp, Artificial Sequence
  synthetic sequence
tgctcccagctat

SEQ ID NO: 2199 - DNA, 13 bp, Artificial Sequence
  synthetic sequence
tcaagggtggggc

SEQ ID NO: 2200 - DNA, 13 bp, Artificial Sequence
  synthetic sequence
gcgtgccttgcgt

SEQ ID NO: 2201 - DNA, 13 bp, Artificial Sequence
  synthetic sequence
ataccaccggggg

SEQ ID NO: 2202 - DNA, 13 bp, Artificial Sequence
  synthetic sequence
aaggagataaagc

SEQ ID NO: 2203 - DNA, 13 bp, Artificial Sequence
  synthetic sequence
ggagaatgtcacc

SEQ ID NO: 2204 - DNA, 13 bp, Artificial Sequence
  synthetic sequence
ccacgaccctcct

SEQ ID NO: 2205 - DNA, 13 bp, Artificial Sequence
  synthetic sequence
gaccctaccttca

SEQ ID NO: 2206 - DNA, 13 bp, Artificial Sequence
  synthetic sequence
acatcaccggggg

SEQ ID NO: 2207 - DNA, 13 bp, Artificial Sequence
  synthetic sequence
accgctatgctcc

SEQ ID NO: 2208 - DNA, 13 bp, Artificial Sequence
  synthetic sequence
tgcaaacccctgc

SEQ ID NO: 2209 - DNA, 13 bp, Artificial Sequence
  synthetic sequence
aggattgtaactg

SEQ ID NO: 2210 - DNA, 13 bp, Artificial Sequence
  synthetic sequence
catatcccctacc

SEQ ID NO: 2211 - DNA, 13 bp, Artificial Sequence
  synthetic sequence
caccctgacgctg

SEQ ID NO: 2212 - DNA, 13 bp, Artificial Sequence
  synthetic sequence
ccctacctcgtcg

SEQ ID NO: 2213 - DNA, 13 bp, Artificial Sequence
  synthetic sequence
ggaaggcaatccc

SEQ ID NO: 2214 - DNA, 13 bp, Artificial Sequence
  synthetic sequence
cacctcccttaca

SEQ ID NO: 2215 - DNA, 13 bp, Artificial Sequence
  synthetic sequence
ccgacgtcatccc

SEQ ID NO: 2216 - DNA, 13 bp, Artificial Sequence
  synthetic sequence
tgatcttgcactt

SEQ ID NO: 2217 - DNA, 13 bp, Artificial Sequence
  synthetic sequence
accacaccaactg

SEQ ID NO: 2218 - DNA, 13 bp, Artificial Sequence
  synthetic sequence
tggtctacagtca

SEQ ID NO: 2219 - DNA, 13 bp, Artificial Sequence
  synthetic sequence
agcagaccctcct

SEQ ID NO: 2220 - DNA, 13 bp, Artificial Sequence
  synthetic sequence
ctgacaacagcac

SEQ ID NO: 2221 - DNA, 13 bp, Artificial Sequence
  synthetic sequence
acctaccaagtgg

SEQ ID NO: 2222 - DNA, 13 bp, Artificial Sequence
  synthetic sequence
catccaatcacca

SEQ ID NO: 2223 - DNA, 13 bp, Artificial Sequence
  synthetic sequence
caccaccaccggc

SEQ ID NO: 2224 - DNA, 13 bp, Artificial Sequence
  synthetic sequence
ccggaattgccag

SEQ ID NO: 2225 - DNA, 13 bp, Artificial Sequence
  synthetic sequence
acacacccgatca

SEQ ID NO: 2226 - DNA, 13 bp, Artificial Sequence
  synthetic sequence
atcaaggctgggg

SEQ ID NO: 2227 - DNA, 13 bp, Artificial Sequence
  synthetic sequence
tgcagctggcaga

SEQ ID NO: 2228 - DNA, 13 bp, Artificial Sequence
  synthetic sequence
ccgactacaaccc

SEQ ID NO: 2229 - DNA, 13 bp, Artificial Sequence
  synthetic sequence
cacgtgacggggg

SEQ ID NO: 2230 - DNA, 13 bp, Artificial Sequence
  synthetic sequence
tacacaggtacgc

SEQ ID NO: 2231 - DNA, 13 bp, Artificial Sequence
  synthetic sequence
agaaaggcggccg

SEQ ID NO: 2232 - DNA, 13 bp, Artificial Sequence
  synthetic sequence
tacatcgatatgc

SEQ ID NO: 2233 - DNA, 13 bp, Artificial Sequence
  synthetic sequence
catcctgacgctg

SEQ ID NO: 2234 - DNA, 13 bp, Artificial Sequence
  synthetic sequence
aacatcgtggaca

SEQ ID NO: 2235 - DNA, 13 bp, Artificial Sequence
  synthetic sequence
gagcctatcatct

SEQ ID NO: 2236 - DNA, 13 bp, Artificial Sequence
  synthetic sequence
gcgtcaggctcca

SEQ ID NO: 2237 - DNA, 13 bp, Artificial Sequence
  synthetic sequence
caccaccgtcggc

SEQ ID NO: 2238 - DNA, 13 bp, Artificial Sequence
  synthetic sequence
attcctggttggg

SEQ ID NO: 2239 - DNA, 13 bp, Artificial Sequence
  synthetic sequence
ccagcgacggctt

SEQ ID NO: 2240 - DNA, 13 bp, Artificial Sequence
  synthetic sequence
tgctggtatgcgg

SEQ ID NO: 2241 - DNA, 13 bp, Artificial Sequence
  synthetic sequence
tagagttctggga

SEQ ID NO: 2242 - DNA, 13 bp, Artificial Sequence
  synthetic sequence
attccacatacgg

SEQ ID NO: 2243 - DNA, 13 bp, Artificial Sequence
  synthetic sequence
gcttgcaactggc

SEQ ID NO: 2244 - DNA, 13 bp, Artificial Sequence
  synthetic sequence
aacatgtggcatg

SEQ ID NO: 2245 - DNA, 13 bp, Artificial Sequence
  synthetic sequence
gaggcgcggtttt

SEQ ID NO: 2246 - DNA, 13 bp, Artificial Sequence
  synthetic sequence
cttgagttctggg

SEQ ID NO: 2247 - DNA, 13 bp, Artificial Sequence
  synthetic sequence
agaagggcggccg

SEQ ID NO: 2248 - DNA, 13 bp, Artificial Sequence
  synthetic sequence
tactatcgccggg

SEQ ID NO: 2249 - DNA, 13 bp, Artificial Sequence
  synthetic sequence
tcactgaggctga

SEQ ID NO: 2250 - DNA, 13 bp, Artificial Sequence
  synthetic sequence
gacctagcagtgg

SEQ ID NO: 2251 - DNA, 13 bp, Artificial Sequence
  synthetic sequence
gggtttgatgtca

SEQ ID NO: 2252 - DNA, 13 bp, Artificial Sequence
  synthetic sequence
gagtgcaattgct

SEQ ID NO: 2253 - DNA, 13 bp, Artificial Sequence
  synthetic sequence
agggcgattcccc

SEQ ID NO: 2254 - DNA, 13 bp, Artificial Sequence
  synthetic sequence
tgcacagatacgc

SEQ ID NO: 2255 - DNA, 13 bp, Artificial Sequence
  synthetic sequence
aggcacctcattt

SEQ ID NO: 2256 - DNA, 13 bp, Artificial Sequence
  synthetic sequence
atgttatccctgc

SEQ ID NO: 2257 - DNA, 13 bp, Artificial Sequence
  synthetic sequence
catctgcgagagc

SEQ ID NO: 2258 - DNA, 13 bp, Artificial Sequence
  synthetic sequence
gaccaagggtggg

SEQ ID NO: 2259 - DNA, 13 bp, Artificial Sequence
  synthetic sequence
ccggggtgtgttc

SEQ ID NO: 2260 - DNA, 13 bp, Artificial Sequence
  synthetic sequence
cctccgacgacgg

SEQ ID NO: 2261 - DNA, 13 bp, Artificial Sequence
  synthetic sequence
caggacgttaagc

SEQ ID NO: 2262 - DNA, 13 bp, Artificial Sequence
  synthetic sequence
gatacgtcgaagg

SEQ ID NO: 2263 - DNA, 13 bp, Artificial Sequence
  synthetic sequence
gaggtcggaagcc

SEQ ID NO: 2264 - DNA, 13 bp, Artificial Sequence
  synthetic sequence
tacacgacagggg

SEQ ID NO: 2265 - DNA, 13 bp, Artificial Sequence
  synthetic sequence
tcaccaggcacgc

SEQ ID NO: 2266 - DNA, 13 bp, Artificial Sequence
  synthetic sequence
gccgcgataaaaa

SEQ ID NO: 2267 - DNA, 13 bp, Artificial Sequence
  synthetic sequence
ttgagaagtggaa

SEQ ID NO: 2268 - DNA, 13 bp, Artificial Sequence
  synthetic sequence
tcctgacactgtc

SEQ ID NO: 2269 - DNA, 13 bp, Artificial Sequence
  synthetic sequence
gatcagggctggg

SEQ ID NO: 2270 - DNA, 13 bp, Artificial Sequence
  synthetic sequence
ggatagggtgggg

SEQ ID NO: 2271 - DNA, 13 bp, Artificial Sequence
  synthetic sequence
gcgtggtctgctg

SEQ ID NO: 2272 - DNA, 13 bp, Artificial Sequence
  synthetic sequence
ctgacaattccac

SEQ ID NO: 2273 - DNA, 13 bp, Artificial Sequence
  synthetic sequence
accaaggatgggg

SEQ ID NO: 2274 - DNA, 13 bp, Artificial Sequence
  synthetic sequence
gttgctcaatgtc

SEQ ID NO: 2275 - DNA, 13 bp, Artificial Sequence
  synthetic sequence
agtccatttacca

SEQ ID NO: 2276 - DNA, 13 bp, Artificial Sequence
  synthetic sequence
gggcgcgacaaga

SEQ ID NO: 2277 - DNA, 13 bp, Artificial Sequence
  synthetic sequence
agatgcctacccc

SEQ ID NO: 2278 - DNA, 13 bp, Artificial Sequence
  synthetic sequence
cccatgaggtcgg

SEQ ID NO: 2279 - DNA, 13 bp, Artificial Sequence
  synthetic sequence
atgtctcccccgc

SEQ ID NO: 2280 - DNA, 13 bp, Artificial Sequence
  synthetic sequence
ccgctcatgatct

SEQ ID NO: 2281 - DNA, 13 bp, Artificial Sequence
  synthetic sequence
tgcagtctgtcaa

SEQ ID NO: 2282 - DNA, 13 bp, Artificial Sequence
  synthetic sequence
gacccgtcgctga

SEQ ID NO: 2283 - DNA, 13 bp, Artificial Sequence
  synthetic sequence
ccatctcatcgaa

SEQ ID NO: 2284 - DNA, 13 bp, Artificial Sequence
  synthetic sequence
tggagtgaaaatg

SEQ ID NO: 2285 - DNA, 13 bp, Artificial Sequence
  synthetic sequence
gctcgacaggctg

SEQ ID NO: 2286 - DNA, 13 bp, Artificial Sequence
  synthetic sequence
ttttgacatgtcc

SEQ ID NO: 2287 - DNA, 13 bp, Artificial Sequence
  synthetic sequence
gagtcaaagcagc

SEQ ID NO: 2288 - DNA, 13 bp, Artificial Sequence
  synthetic sequence
cctcctcgatgtt

SEQ ID NO: 2289 - DNA, 13 bp, Artificial Sequence
  synthetic sequence
cgggcgtgagctc

SEQ ID NO: 2290 - DNA, 13 bp, Artificial Sequence
  synthetic sequence
ttgcagtctatca

SEQ ID NO: 2291 - DNA, 13 bp, Artificial Sequence
  synthetic sequence
gccatgatggtag

SEQ ID NO: 2292 - DNA, 13 bp, Artificial Sequence
  synthetic sequence
aggtggatgaggc

SEQ ID NO: 2293 - DNA, 13 bp, Artificial Sequence
  synthetic sequence
gggcaatcattgg

SEQ ID NO: 2294 - DNA, 13 bp, Artificial Sequence
  synthetic sequence
accttcgcccagt

SEQ ID NO: 2295 - DNA, 13 bp, Artificial Sequence
  synthetic sequence
gagaaggtgaaca

SEQ ID NO: 2296 - DNA, 13 bp, Artificial Sequence
  synthetic sequence
ccgtgatgggcgc

SEQ ID NO: 2297 - DNA, 13 bp, Artificial Sequence
  synthetic sequence
cggcagctggcca

SEQ ID NO: 2298 - DNA, 13 bp, Artificial Sequence
  synthetic sequence
aacacgaggaagg

SEQ ID NO: 2299 - DNA, 13 bp, Artificial Sequence
  synthetic sequence
ggggacctcatgg

SEQ ID NO: 2300 - DNA, 13 bp, Artificial Sequence
  synthetic sequence
gggtgaggtagta

SEQ ID NO: 2301 - DNA, 13 bp, Artificial Sequence
  synthetic sequence
gtgaaaaattcgg

SEQ ID NO: 2302 - DNA, 13 bp, Artificial Sequence
  synthetic sequence
gccatgatggtgg

SEQ ID NO: 2303 - DNA, 13 bp, Artificial Sequence
  synthetic sequence
aagccatcaatga

SEQ ID NO: 2304 - DNA, 13 bp, Artificial Sequence
  synthetic sequence
ggtgttggcccat

SEQ ID NO: 2305 - DNA, 13 bp, Artificial Sequence
  synthetic sequence
gtgcagggtgtca

SEQ ID NO: 2306 - DNA, 13 bp, Artificial Sequence
  synthetic sequence
ccggaagttgagg

SEQ ID NO: 2307 - DNA, 13 bp, Artificial Sequence
  synthetic sequence
ctcattctccccc

SEQ ID NO: 2308 - DNA, 13 bp, Artificial Sequence
  synthetic sequence
acagtgaggctgc

SEQ ID NO: 2309 - DNA, 13 bp, Artificial Sequence
  synthetic sequence
gagtcaaaacagc

SEQ ID NO: 2310 - DNA, 13 bp, Artificial Sequence
  synthetic sequence
ccgaggagctggc

SEQ ID NO: 2311 - DNA, 13 bp, Artificial Sequence
  synthetic sequence
ggagtgagatggt

SEQ ID NO: 2312 - DNA, 13 bp, Artificial Sequence
  synthetic sequence
tccgcaggatttc

SEQ ID NO: 2313 - DNA, 13 bp, Artificial Sequence
  synthetic sequence
accttagcccagt

SEQ ID NO: 2314 - DNA, 13 bp, Artificial Sequence
  synthetic sequence
ccatggagtcttt

SEQ ID NO: 2315 - DNA, 13 bp, Artificial Sequence
  synthetic sequence
tggggctgccagt

SEQ ID NO: 2316 - DNA, 13 bp, Artificial Sequence
  synthetic sequence
gggtcacgggtaa

SEQ ID NO: 2317 - DNA, 13 bp, Artificial Sequence
  synthetic sequence
cagtcgttcgtga

SEQ ID NO: 2318 - DNA, 13 bp, Artificial Sequence
  synthetic sequence
gtggtgatggtcc

SEQ ID NO: 2319 - DNA, 13 bp, Artificial Sequence
  synthetic sequence
agggaccggagcc

SEQ ID NO: 2320 - DNA, 13 bp, Artificial Sequence
  synthetic sequence
cggacgttgaggg

SEQ ID NO: 2321 - DNA, 13 bp, Artificial Sequence
  synthetic sequence
gaagagctggcca

SEQ ID NO: 2322 - DNA, 13 bp, Artificial Sequence
  synthetic sequence
ccccagttgtagg

SEQ ID NO: 2323 - DNA, 13 bp, Artificial Sequence
  synthetic sequence
tccgcaggatctc

SEQ ID NO: 2324 - DNA, 13 bp, Artificial Sequence
  synthetic sequence
agtcaaagtcgcc

SEQ ID NO: 2325 - DNA, 13 bp, Artificial Sequence
  synthetic sequence
acctggcatgggc

SEQ ID NO: 2326 - DNA, 13 bp, Artificial Sequence
  synthetic sequence
aggatgatggcat

SEQ ID NO: 2327 - DNA, 13 bp, Artificial Sequence
  synthetic sequence
ggtccatggcgta

SEQ ID NO: 2328 - DNA, 13 bp, Artificial Sequence
  synthetic sequence
aagaacacaagga

SEQ ID NO: 2329 - DNA, 13 bp, Artificial Sequence
  synthetic sequence
agccgtatgagac

SEQ ID NO: 2330 - DNA, 13 bp, Artificial Sequence
  synthetic sequence
tcgccgctcatga

SEQ ID NO: 2331 - DNA, 13 bp, Artificial Sequence
  synthetic sequence
gtgatggtaaggc

SEQ ID NO: 2332 - DNA, 13 bp, Artificial Sequence
  synthetic sequence
agaaggggatctc

SEQ ID NO: 2333 - DNA, 13 bp, Artificial Sequence
  synthetic sequence
gccatcagtgatg

SEQ ID NO: 2334 - DNA, 13 bp, Artificial Sequence
  synthetic sequence
tcttgacatgtcc

SEQ ID NO: 2335 - DNA, 13 bp, Artificial Sequence
  synthetic sequence
agggtggtgaagg

SEQ ID NO: 2336 - DNA, 13 bp, Artificial Sequence
  synthetic sequence
tcaaccaaggccc

SEQ ID NO: 2337 - DNA, 13 bp, Artificial Sequence
  synthetic sequence
ccatctcatcaaa

SEQ ID NO: 2338 - DNA, 13 bp, Artificial Sequence
  synthetic sequence
tttccatagactc

SEQ ID NO: 2339 - DNA, 13 bp, Artificial Sequence
  synthetic sequence
ccgcaggtgcatg

SEQ ID NO: 2340 - DNA, 13 bp, Artificial Sequence
  synthetic sequence
tgagctcatacca

SEQ ID NO: 2341 - DNA, 13 bp, Artificial Sequence
  synthetic sequence
aggagtaggcaaa

SEQ ID NO: 2342 - DNA, 13 bp, Artificial Sequence
  synthetic sequence
cccatgagatcgg

SEQ ID NO: 2343 - DNA, 13 bp, Artificial Sequence
  synthetic sequence
tggtcatagatgt

SEQ ID NO: 2344 - DNA, 13 bp, Artificial Sequence
  synthetic sequence
gctcgacaggccg

SEQ ID NO: 2345 - DNA, 13 bp, Artificial Sequence
  synthetic sequence
tgaccttcttctg

SEQ ID NO: 2346 - DNA, 13 bp, Artificial Sequence
  synthetic sequence
gtccagtggcgcc

SEQ ID NO: 2347 - DNA, 13 bp, Artificial Sequence
  synthetic sequence
gagctgccgaagg

SEQ ID NO: 2348 - DNA, 13 bp, Artificial Sequence
  synthetic sequence
ccatgatggttgt

SEQ ID NO: 2349 - DNA, 13 bp, Artificial Sequence
  synthetic sequence
caggctccccctc

SEQ ID NO: 2350 - DNA, 13 bp, Artificial Sequence
  synthetic sequence
agatggtcataaa

SEQ ID NO: 2351 - DNA, 13 bp, Artificial Sequence
  synthetic sequence
cctgaagagttga

SEQ ID NO: 2352 - DNA, 13 bp, Artificial Sequence
  synthetic sequence
gtctgctgggcgt

SEQ ID NO: 2353 - DNA, 13 bp, Artificial Sequence
  synthetic sequence
atgtcgcccccgc

SEQ ID NO: 2354 - DNA, 13 bp, Artificial Sequence
  synthetic sequence
aggccccgcgtct

SEQ ID NO: 2355 - DNA, 13 bp, Artificial Sequence
  synthetic sequence
gtgaggtagtaat

SEQ ID NO: 2356 - DNA, 13 bp, Artificial Sequence
  synthetic sequence
acctggcacgggc

SEQ ID NO: 2357 - DNA, 13 bp, Artificial Sequence
  synthetic sequence
gagtggtagggtc

SEQ ID NO: 2358 - DNA, 13 bp, Artificial Sequence
  synthetic sequence
cccagtcccgaag

SEQ ID NO: 2359 - DNA, 13 bp, Artificial Sequence
  synthetic sequence
tccatctcgtcaa

SEQ ID NO: 2360 - DNA, 13 bp, Artificial Sequence
  synthetic sequence
tccatttcatcga

SEQ ID NO: 2361 - DNA, 13 bp, Artificial Sequence
  synthetic sequence
ccggtcctgatgt

SEQ ID NO: 2362 - DNA, 13 bp, Artificial Sequence
  synthetic sequence
gacagctggctgg

SEQ ID NO: 2363 - DNA, 13 bp, Artificial Sequence
  synthetic sequence
ggcagtcattggt

SEQ ID NO: 2364 - DNA, 13 bp, Artificial Sequence
  synthetic sequence
cccagctgtaggt

SEQ ID NO: 2365 - DNA, 13 bp, Artificial Sequence
  synthetic sequence
gagtcgaagtcgc

SEQ ID NO: 2366 - DNA, 13 bp, Artificial Sequence
  synthetic sequence
tcgccactcatga

SEQ ID NO: 2367 - DNA, 13 bp, Artificial Sequence
  synthetic sequence
gcccgttggggca

SEQ ID NO: 2368 - DNA, 13 bp, Artificial Sequence
  synthetic sequence
accttggcccagt

SEQ ID NO: 2369 - DNA, 13 bp, Artificial Sequence
  synthetic sequence
acctcctctatgt

SEQ ID NO: 2370 - DNA, 13 bp, Artificial Sequence
  synthetic sequence
acctcagtgaaga

SEQ ID NO: 2371 - DNA, 13 bp, Artificial Sequence
  synthetic sequence
gtgagctcgtacc

SEQ ID NO: 2372 - DNA, 13 bp, Artificial Sequence
  synthetic sequence
aggtcaccttctt

SEQ ID NO: 2373 - DNA, 13 bp, Artificial Sequence
  synthetic sequence
accaggcacctgg

SEQ ID NO: 2374 - DNA, 13 bp, Artificial Sequence
  synthetic sequence
gggttgccgggca

SEQ ID NO: 2375 - DNA, 13 bp, Artificial Sequence
  synthetic sequence
cacctaggtgtca

SEQ ID NO: 2376 - DNA, 13 bp, Artificial Sequence
  synthetic sequence
gctgaggagctgg

SEQ ID NO: 2377 - DNA, 13 bp, Artificial Sequence
  synthetic sequence
tcaggagctgggt

SEQ ID NO: 2378 - DNA, 13 bp, Artificial Sequence
  synthetic sequence
tatgtgtgcagtg

SEQ ID NO: 2379 - DNA, 13 bp, Artificial Sequence
  synthetic sequence
gctgtctctgtta

SEQ ID NO: 2380 - DNA, 13 bp, Artificial Sequence
  synthetic sequence
gagtcaaagtcac

SEQ ID NO: 2381 - DNA, 13 bp, Artificial Sequence
  synthetic sequence
tcgaaatcgcctg

SEQ ID NO: 2382 - DNA, 13 bp, Artificial Sequence
  synthetic sequence
cccccgtcgtagc

SEQ ID NO: 2383 - DNA, 13 bp, Artificial Sequence
  synthetic sequence
ccgcaggtgcacg

SEQ ID NO: 2384 - DNA, 13 bp, Artificial Sequence
  synthetic sequence
cccgaggagttga

SEQ ID NO: 2385 - DNA, 13 bp, Artificial Sequence
  synthetic sequence
tccatctcgtcga

SEQ ID NO: 2386 - DNA, 13 bp, Artificial Sequence
  synthetic sequence
tactctgatggta

SEQ ID NO: 2387 - DNA, 13 bp, Artificial Sequence
  synthetic sequence
gccaggtgatgct

SEQ ID NO: 2388 - DNA, 13 bp, Artificial Sequence
  synthetic sequence
ccagtcctgatgt

SEQ ID NO: 2389 - DNA, 13 bp, Artificial Sequence
  synthetic sequence
agatggtcataga

SEQ ID NO: 2390 - DNA, 13 bp, Artificial Sequence
  synthetic sequence
tgactttggccca

SEQ ID NO: 2391 - DNA, 13 bp, Artificial Sequence
  synthetic sequence
agggtgggtttga

SEQ ID NO: 2392 - DNA, 13 bp, Artificial Sequence
  synthetic sequence
acagggatgaagt

SEQ ID NO: 2393 - DNA, 13 bp, Artificial Sequence
  synthetic sequence
tgggcttgaggcg

SEQ ID NO: 2394 - DNA, 13 bp, Artificial Sequence
  synthetic sequence
gtgactttcttct

SEQ ID NO: 2395 - DNA, 13 bp, Artificial Sequence
  synthetic sequence
tcatttttggcca

SEQ ID NO: 2396 - DNA, 13 bp, Artificial Sequence
  synthetic sequence
accggggaccgca

SEQ ID NO: 2397 - DNA, 13 bp, Artificial Sequence
  synthetic sequence
ttgagtcaaagca

SEQ ID NO: 2398 - DNA, 13 bp, Artificial Sequence
  synthetic sequence
gggataaagtcca

SEQ ID NO: 2399 - DNA, 13 bp, Artificial Sequence
  synthetic sequence
agtaggagtaggc

SEQ ID NO: 2400 - DNA, 13 bp, Artificial Sequence
  synthetic sequence
gagatggccatcc

SEQ ID NO: 2401 - DNA, 13 bp, Artificial Sequence
  synthetic sequence
tccatgttttcca

SEQ ID NO: 2402 - DNA, 13 bp, Artificial Sequence
  synthetic sequence
gagctggagggaa

SEQ ID NO: 2403 - DNA, 13 bp, Artificial Sequence
  synthetic sequence
ggagctgccaaag

SEQ ID NO: 2404 - DNA, 13 bp, Artificial Sequence
  synthetic sequence
aaacacctggtgt

SEQ ID NO: 2405 - DNA, 13 bp, Artificial Sequence
  synthetic sequence
aggtggtcataaa

SEQ ID NO: 2406 - DNA, 13 bp, Artificial Sequence
  synthetic sequence
ggctggaaggtga

SEQ ID NO: 2407 - DNA, 13 bp, Artificial Sequence
  synthetic sequence
tggagatggatca

SEQ ID NO: 2408 - DNA, 13 bp, Artificial Sequence
  synthetic sequence
cagcgggtgtcat

SEQ ID NO: 2409 - DNA, 13 bp, Artificial Sequence
  synthetic sequence
ccacccaagagaa

SEQ ID NO: 2410 - DNA, 13 bp, Artificial Sequence
  synthetic sequence
tgaggtagtagta

SEQ ID NO: 2411 - DNA, 13 bp, Artificial Sequence
  synthetic sequence
cacctaggtgtta

SEQ ID NO: 2412 - DNA, 13 bp, Artificial Sequence
  synthetic sequence
atgatggagtccc

SEQ ID NO: 2413 - DNA, 13 bp, Artificial Sequence
  synthetic sequence
tgctcattgtcca

SEQ ID NO: 2414 - DNA, 13 bp, Artificial Sequence
  synthetic sequence
tctcattttcccc

SEQ ID NO: 2415 - DNA, 13 bp, Artificial Sequence
  synthetic sequence
tgatgttggccgc

SEQ ID NO: 2416 - DNA, 13 bp, Artificial Sequence
  synthetic sequence
acgatgctggagt

SEQ ID NO: 2417 - DNA, 13 bp, Artificial Sequence
  synthetic sequence
cgggtgaggtaat

SEQ ID NO: 2418 - DNA, 13 bp, Artificial Sequence
  synthetic sequence
ccaggcagagtgg

SEQ ID NO: 2419 - DNA, 13 bp, Artificial Sequence
  synthetic sequence
gtatctgagtcac

SEQ ID NO: 2420 - DNA, 13 bp, Artificial Sequence
  synthetic sequence
acagttgtttcag

SEQ ID NO: 2421 - DNA, 13 bp, Artificial Sequence
  synthetic sequence
cattcttagccat

SEQ ID NO: 2422 - DNA, 13 bp, Artificial Sequence
  synthetic sequence
gcggtgatgggag

SEQ ID NO: 2423 - DNA, 13 bp, Artificial Sequence
  synthetic sequence
aacagaacagcca

SEQ ID NO: 2424 - DNA, 13 bp, Artificial Sequence
  synthetic sequence
gccgtgataggcg

SEQ ID NO: 2425 - DNA, 13 bp, Artificial Sequence
  synthetic sequence
tttttgacgtgtc

SEQ ID NO: 2426 - DNA, 13 bp, Artificial Sequence
  synthetic sequence
ccgtggagtcttt

SEQ ID NO: 2427 - DNA, 13 bp, Artificial Sequence
  synthetic sequence
gccatcattgatg

SEQ ID NO: 2428 - DNA, 13 bp, Artificial Sequence
  synthetic sequence
aggtagtagaccc

SEQ ID NO: 2429 - DNA, 13 bp, Artificial Sequence
  synthetic sequence
atcggttggggag

SEQ ID NO: 2430 - DNA, 13 bp, Artificial Sequence
  synthetic sequence
ttggagagggctg

SEQ ID NO: 2431 - DNA, 13 bp, Artificial Sequence
  synthetic sequence
aatctccgagact

SEQ ID NO: 2432 - DNA, 13 bp, Artificial Sequence
  synthetic sequence
cagtcgttggtga

SEQ ID NO: 2433 - DNA, 13 bp, Artificial Sequence
  synthetic sequence
ccatggagtcgtt

SEQ ID NO: 2434 - DNA, 13 bp, Artificial Sequence
  synthetic sequence
ccccaggtgtagg

SEQ ID NO: 2435 - DNA, 13 bp, Artificial Sequence
  synthetic sequence
ccagagctgttga

SEQ ID NO: 2436 - DNA, 13 bp, Artificial Sequence
  synthetic sequence
taagctcgtacca

SEQ ID NO: 2437 - DNA, 13 bp, Artificial Sequence
  synthetic sequence
cacagcacaggaa

SEQ ID NO: 2438 - DNA, 13 bp, Artificial Sequence
  synthetic sequence
ccgcaggtacagg

SEQ ID NO: 2439 - DNA, 13 bp, Artificial Sequence
  synthetic sequence
ccaggcagcacag

SEQ ID NO: 2440 - DNA, 13 bp, Artificial Sequence
  synthetic sequence
ggacatggcccga

SEQ ID NO: 2441 - DNA, 13 bp, Artificial Sequence
  synthetic sequence
ccagttctgatgt

SEQ ID NO: 2442 - DNA, 13 bp, Artificial Sequence
  synthetic sequence
tcaccactcatga

SEQ ID NO: 2443 - DNA, 13 bp, Artificial Sequence
  synthetic sequence
gctctgggcatcc

SEQ ID NO: 2444 - DNA, 13 bp, Artificial Sequence
  synthetic sequence
gggggtaggacca

SEQ ID NO: 2445 - DNA, 13 bp, Artificial Sequence
  synthetic sequence
aggccggtggaca

SEQ ID NO: 2446 - DNA, 13 bp, Artificial Sequence
  synthetic sequence
cgaacgttgaggg

SEQ ID NO: 2447 - DNA, 13 bp, Artificial Sequence
  synthetic sequence
ccacaggtgcatg

SEQ ID NO: 2448 - DNA, 13 bp, Artificial Sequence
  synthetic sequence
cctcctcaatgtt

SEQ ID NO: 2449 - DNA, 13 bp, Artificial Sequence
  synthetic sequence
tggcaggggcact

SEQ ID NO: 2450 - DNA, 13 bp, Artificial Sequence
  synthetic sequence
acatgatcttgaa

SEQ ID NO: 2451 - DNA, 13 bp, Artificial Sequence
  synthetic sequence
tcacactccccct

SEQ ID NO: 2452 - DNA, 13 bp, Artificial Sequence
  synthetic sequence
ggcgtgagccagg

SEQ ID NO: 2453 - DNA, 13 bp, Artificial Sequence
  synthetic sequence
tggagaggatctg

SEQ ID NO: 2454 - DNA, 13 bp, Artificial Sequence
  synthetic sequence
agctggtaattgt

SEQ ID NO: 2455 - DNA, 13 bp, Artificial Sequence
  synthetic sequence
agggctttgatgt

SEQ ID NO: 2456 - DNA, 13 bp, Artificial Sequence
  synthetic sequence
ttgcagtcgatca

SEQ ID NO: 2457 - DNA, 13 bp, Artificial Sequence
  synthetic sequence
agggaactgagta

SEQ ID NO: 2458 - DNA, 13 bp, Artificial Sequence
  synthetic sequence
gtctgctgggcat

SEQ ID NO: 2459 - DNA, 13 bp, Artificial Sequence
  synthetic sequence
tggaggtgcaata

SEQ ID NO: 2460 - DNA, 13 bp, Artificial Sequence
  synthetic sequence
tggaggtggatca

SEQ ID NO: 2461 - DNA, 13 bp, Artificial Sequence
  synthetic sequence
gctgaagagctgg

SEQ ID NO: 2462 - DNA, 13 bp, Artificial Sequence
  synthetic sequence
agatgaagaacca

SEQ ID NO: 2463 - DNA, 13 bp, Artificial Sequence
  synthetic sequence
tcctgaccccggt

SEQ ID NO: 2464 - DNA, 13 bp, Artificial Sequence
  synthetic sequence
acctggcaagggc

SEQ ID NO: 2465 - DNA, 13 bp, Artificial Sequence
  synthetic sequence
tgtcgttcccgcc

SEQ ID NO: 2466 - DNA, 13 bp, Artificial Sequence
  synthetic sequence
tcccgtcacgccc

SEQ ID NO: 2467 - DNA, 13 bp, Artificial Sequence
  synthetic sequence
cccagtcccgcag

SEQ ID NO: 2468 - DNA, 13 bp, Artificial Sequence
  synthetic sequence
gagaaagtgaaca

SEQ ID NO: 2469 - DNA, 13 bp, Artificial Sequence
  synthetic sequence
ccttgatgtaaca

SEQ ID NO: 2470 - DNA, 13 bp, Artificial Sequence
  synthetic sequence
ccatctcccggtc

SEQ ID NO: 2471 - DNA, 13 bp, Artificial Sequence
  synthetic sequence
gcctcatacacaa

SEQ ID NO: 2472 - DNA, 13 bp, Artificial Sequence
  synthetic sequence
cgggtatcatacg

SEQ ID NO: 2473 - DNA, 13 bp, Artificial Sequence
  synthetic sequence
ccacccaggagaa

SEQ ID NO: 2474 - DNA, 13 bp, Artificial Sequence
  synthetic sequence
gccgtatgaggca

SEQ ID NO: 2475 - DNA, 13 bp, Artificial Sequence
  synthetic sequence
cgttgacaggccc

SEQ ID NO: 2476 - DNA, 13 bp, Artificial Sequence
  synthetic sequence
tcaaaagtcacct

SEQ ID NO: 2477 - DNA, 13 bp, Artificial Sequence
  synthetic sequence
cgagtctgctgag

SEQ ID NO: 2478 - DNA, 13 bp, Artificial Sequence
  synthetic sequence
ccccaggtgtaag

SEQ ID NO: 2479 - DNA, 13 bp, Artificial Sequence
  synthetic sequence
ccggttctgatgt

SEQ ID NO: 2480 - DNA, 13 bp, Artificial Sequence
  synthetic sequence
ctccacaaatacc

SEQ ID NO: 2481 - DNA, 13 bp, Artificial Sequence
  synthetic sequence
tcaaccagggccc

SEQ ID NO: 2482 - DNA, 13 bp, Artificial Sequence
  synthetic sequence
cctcctcgatatt

SEQ ID NO: 2483 - DNA, 13 bp, Artificial Sequence
  synthetic sequence
tccgccggaacgg

SEQ ID NO: 2484 - DNA, 13 bp, Artificial Sequence
  synthetic sequence
gcctgctgtggta

SEQ ID NO: 2485 - DNA, 13 bp, Artificial Sequence
  synthetic sequence
ggcaagctcggcc

SEQ ID NO: 2486 - DNA, 13 bp, Artificial Sequence
  synthetic sequence
aaggtgaacagct

SEQ ID NO: 2487 - DNA, 13 bp, Artificial Sequence
  synthetic sequence
acagctggctagc

SEQ ID NO: 2488 - DNA, 13 bp, Artificial Sequence
  synthetic sequence
accttggcccaat

SEQ ID NO: 2489 - DNA, 13 bp, Artificial Sequence
  synthetic sequence
agggatgatagta

SEQ ID NO: 2490 - DNA, 13 bp, Artificial Sequence
  synthetic sequence
aagaactctggag

SEQ ID NO: 2491 - DNA, 13 bp, Artificial Sequence
  synthetic sequence
ccggctctccctc

SEQ ID NO: 2492 - DNA, 13 bp, Artificial Sequence
  synthetic sequence
gagaaggtaaaca

SEQ ID NO: 2493 - DNA, 13 bp, Artificial Sequence
  synthetic sequence
gtggtggggtcac

SEQ ID NO: 2494 - DNA, 13 bp, Artificial Sequence
  synthetic sequence
agtaagctctcag

SEQ ID NO: 2495 - DNA, 13 bp, Artificial Sequence
  synthetic sequence
ggtcggagtgtta

SEQ ID NO: 2496 - DNA, 13 bp, Artificial Sequence
  synthetic sequence
cgaaggtaacctt

SEQ ID NO: 2497 - DNA, 13 bp, Artificial Sequence
  synthetic sequence
ccccgctgtagcc

SEQ ID NO: 2498 - DNA, 13 bp, Artificial Sequence
  synthetic sequence
tcattcttggcca

SEQ ID NO: 2499 - DNA, 13 bp, Artificial Sequence
  synthetic sequence
tccatttcgtcga

SEQ ID NO: 2500 - DNA, 13 bp, Artificial Sequence
  synthetic sequence
tcaaaagttacct

SEQ ID NO: 2501 - DNA, 13 bp, Artificial Sequence
  synthetic sequence
tgggcttgagccg

SEQ ID NO: 2502 - DNA, 13 bp, Artificial Sequence
  synthetic sequence
tctcgggacagcc

SEQ ID NO: 2503 - DNA, 13 bp, Artificial Sequence
  synthetic sequence
actggtatgaact

SEQ ID NO: 2504 - DNA, 13 bp, Artificial Sequence
  synthetic sequence
tctctgcagtcat

SEQ ID NO: 2505 - DNA, 13 bp, Artificial Sequence
  synthetic sequence
ccccagttgtaag

SEQ ID NO: 2506 - DNA, 13 bp, Artificial Sequence
  synthetic sequence
agaaagggatctc

SEQ ID NO: 2507 - DNA, 13 bp, Artificial Sequence
  synthetic sequence
ccggagaccgcat

SEQ ID NO: 2508 - DNA, 13 bp, Artificial Sequence
  synthetic sequence
gtctgctgcgcat

SEQ ID NO: 2509 - DNA, 13 bp, Artificial Sequence
  synthetic sequence
atggagtgttgct

SEQ ID NO: 2510 - DNA, 13 bp, Artificial Sequence
  synthetic sequence
ccatctcatcata

SEQ ID NO: 2511 - DNA, 13 bp, Artificial Sequence
  synthetic sequence
gacatgagggaag

SEQ ID NO: 2512 - DNA, 13 bp, Artificial Sequence
  synthetic sequence
catggagtgaaaa

SEQ ID NO: 2513 - DNA, 13 bp, Artificial Sequence
  synthetic sequence
acataggtgccag

SEQ ID NO: 2514 - DNA, 13 bp, Artificial Sequence
  synthetic sequence
gtaagctcatacc

SEQ ID NO: 2515 - DNA, 13 bp, Artificial Sequence
  synthetic sequence
cccatatgatgcc

SEQ ID NO: 2516 - DNA, 13 bp, Artificial Sequence
  synthetic sequence
tcgacgccggcaa

SEQ ID NO: 2517 - DNA, 13 bp, Artificial Sequence
  synthetic sequence
taccagctcaccg

SEQ ID NO: 2518 - DNA, 13 bp, Artificial Sequence
  synthetic sequence
tgaagttgtggcg

SEQ ID NO: 2519 - DNA, 13 bp, Artificial Sequence
  synthetic sequence
tggttatggtgag

SEQ ID NO: 2520 - DNA, 13 bp, Artificial Sequence
  synthetic sequence
ttcttgaaacact

SEQ ID NO: 2521 - DNA, 13 bp, Artificial Sequence
  synthetic sequence
ccgaaggtctttg

SEQ ID NO: 2522 - DNA, 13 bp, Artificial Sequence
  synthetic sequence
ccggagctgttga

SEQ ID NO: 2523 - DNA, 13 bp, Artificial Sequence
  synthetic sequence
ggcagtgttgaca

SEQ ID NO: 2524 - DNA, 13 bp, Artificial Sequence
  synthetic sequence
ctgggtgtaatcc

SEQ ID NO: 2525 - DNA, 13 bp, Artificial Sequence
  synthetic sequence
gtgttggcccgtg

SEQ ID NO: 2526 - DNA, 13 bp, Artificial Sequence
  synthetic sequence
aaggcttgtccca

SEQ ID NO: 2527 - DNA, 13 bp, Artificial Sequence
  synthetic sequence
tgaggcaacgcca

SEQ ID NO: 2528 - DNA, 13 bp, Artificial Sequence
  synthetic sequence
tacagtcgatcac

SEQ ID NO: 2529 - DNA, 13 bp, Artificial Sequence
  synthetic sequence
gtgagttcgtacc

SEQ ID NO: 2530 - DNA, 13 bp, Artificial Sequence
  synthetic sequence
tcagttcgtacca

SEQ ID NO: 2531 - DNA, 13 bp, Artificial Sequence
  synthetic sequence
cattctctcccca

SEQ ID NO: 2532 - DNA, 13 bp, Artificial Sequence
  synthetic sequence
cacaggtgcacgg

SEQ ID NO: 2533 - DNA, 13 bp, Artificial Sequence
  synthetic sequence
cccgaagagttga

SEQ ID NO: 2534 - DNA, 13 bp, Artificial Sequence
  synthetic sequence
tttgctgggcgta

SEQ ID NO: 2535 - DNA, 13 bp, Artificial Sequence
  synthetic sequence
accccggtcctga

SEQ ID NO: 2536 - DNA, 13 bp, Artificial Sequence
  synthetic sequence
ttacagtctatca

SEQ ID NO: 2537 - DNA, 13 bp, Artificial Sequence
  synthetic sequence
ccccgctgaagcc

SEQ ID NO: 2538 - DNA, 13 bp, Artificial Sequence
  synthetic sequence
cccaggtgtatgt

SEQ ID NO: 2539 - DNA, 13 bp, Artificial Sequence
  synthetic sequence
gatggaggggacc

SEQ ID NO: 2540 - DNA, 13 bp, Artificial Sequence
  synthetic sequence
tcccagtgcggat

SEQ ID NO: 2541 - DNA, 13 bp, Artificial Sequence
  synthetic sequence
tggtgtcatagga

SEQ ID NO: 2542 - DNA, 13 bp, Artificial Sequence
  synthetic sequence
ggacattgccaga

SEQ ID NO: 2543 - DNA, 13 bp, Artificial Sequence
  synthetic sequence
agtggagtggggc

SEQ ID NO: 2544 - DNA, 13 bp, Artificial Sequence
  synthetic sequence
cagccacgttgca

SEQ ID NO: 2545 - DNA, 13 bp, Artificial Sequence
  synthetic sequence
gtcactttcttct

SEQ ID NO: 2546 - DNA, 13 bp, Artificial Sequence
  synthetic sequence
ggggtgagatggt

SEQ ID NO: 2547 - DNA, 13 bp, Artificial Sequence
  synthetic sequence
ggtcaggtagtat

SEQ ID NO: 2548 - DNA, 13 bp, Artificial Sequence
  synthetic sequence
ggttccccctcaa

SEQ ID NO: 2549 - DNA, 13 bp, Artificial Sequence
  synthetic sequence
caaagcagaagaa

SEQ ID NO: 2550 - DNA, 13 bp, Artificial Sequence
  synthetic sequence
tccatctcatcgt

SEQ ID NO: 2551 - DNA, 13 bp, Artificial Sequence
  synthetic sequence
tcagttcatacca

SEQ ID NO: 2552 - DNA, 13 bp, Artificial Sequence
  synthetic sequence
gtagtgatggtcc

SEQ ID NO: 2553 - DNA, 13 bp, Artificial Sequence
  synthetic sequence
ctcatggtggttt

SEQ ID NO: 2554 - DNA, 13 bp, Artificial Sequence
  synthetic sequence
taggcttgaggcg

SEQ ID NO: 2555 - DNA, 13 bp, Artificial Sequence
  synthetic sequence
cctcctctatatt

SEQ ID NO: 2556 - DNA, 13 bp, Artificial Sequence
  synthetic sequence
gtgagccaaggcc

SEQ ID NO: 2557 - DNA, 13 bp, Artificial Sequence
  synthetic sequence
ccgttcttcacgt

SEQ ID NO: 2558 - DNA, 13 bp, Artificial Sequence
  synthetic sequence
gagagctggctcg

SEQ ID NO: 2559 - DNA, 13 bp, Artificial Sequence
  synthetic sequence
caatcgttggtga

SEQ ID NO: 2560 - DNA, 13 bp, Artificial Sequence
  synthetic sequence
tgaagaattcggg

SEQ ID NO: 2561 - DNA, 13 bp, Artificial Sequence
  synthetic sequence
gcagaatttctgc

SEQ ID NO: 2562 - DNA, 13 bp, Artificial Sequence
  synthetic sequence
tcattctttgcca

SEQ ID NO: 2563 - DNA, 13 bp, Artificial Sequence
  synthetic sequence
cagtgatgggagc

SEQ ID NO: 2564 - DNA, 13 bp, Artificial Sequence
  synthetic sequence
cattttcacccca

SEQ ID NO: 2565 - DNA, 13 bp, Artificial Sequence
  synthetic sequence
tcaagcccgtgta

SEQ ID NO: 2566 - DNA, 13 bp, Artificial Sequence
  synthetic sequence
gcagacaactggc

SEQ ID NO: 2567 - DNA, 13 bp, Artificial Sequence
  synthetic sequence
gctttcacatagc

SEQ ID NO: 2568 - DNA, 13 bp, Artificial Sequence
  synthetic sequence
gtggtgatggttc

SEQ ID NO: 2569 - DNA, 13 bp, Artificial Sequence
  synthetic sequence
tcattctcgcccc

SEQ ID NO: 2570 - DNA, 13 bp, Artificial Sequence
  synthetic sequence
ttggggaggaggt

SEQ ID NO: 2571 - DNA, 13 bp, Artificial Sequence
  synthetic sequence
aagccatcaacga

SEQ ID NO: 2572 - DNA, 13 bp, Artificial Sequence
  synthetic sequence
agaccatggagtc

SEQ ID NO: 2573 - DNA, 13 bp, Artificial Sequence
  synthetic sequence
agagctggcttgc

SEQ ID NO: 2574 - DNA, 13 bp, Artificial Sequence
  synthetic sequence
tcttgatgtggcc

SEQ ID NO: 2575 - DNA, 13 bp, Artificial Sequence
  synthetic sequence
ttcttcacatgac

SEQ ID NO: 2576 - DNA, 13 bp, Artificial Sequence
  synthetic sequence
tgagttcatacca

SEQ ID NO: 2577 - DNA, 13 bp, Artificial Sequence
  synthetic sequence
ggtccatgtagtg

SEQ ID NO: 2578 - DNA, 13 bp, Artificial Sequence
  synthetic sequence
tgcatgctctcca

SEQ ID NO: 2579 - DNA, 13 bp, Artificial Sequence
  synthetic sequence
cacggacacttga

SEQ ID NO: 2580 - DNA, 13 bp, Artificial Sequence
  synthetic sequence
tcaccgctcatga

SEQ ID NO: 2581 - DNA, 13 bp, Artificial Sequence
  synthetic sequence
acggggatgaagt

SEQ ID NO: 2582 - DNA, 13 bp, Artificial Sequence
  synthetic sequence
ccatgattgttgt

SEQ ID NO: 2583 - DNA, 13 bp, Artificial Sequence
  synthetic sequence
tcacccgaccaag

SEQ ID NO: 2584 - DNA, 13 bp, Artificial Sequence
  synthetic sequence
caggcatgggcgt

SEQ ID NO: 2585 - DNA, 13 bp, Artificial Sequence
  synthetic sequence
cagtcctaatgtt

SEQ ID NO: 2586 - DNA, 13 bp, Artificial Sequence
  synthetic sequence
aggtggtcataga

SEQ ID NO: 2587 - DNA, 13 bp, Artificial Sequence
  synthetic sequence
cgtgtctgttggg

SEQ ID NO: 2588 - DNA, 13 bp, Artificial Sequence
  synthetic sequence
agtcaaagcaacg

SEQ ID NO: 2589 - DNA, 13 bp, Artificial Sequence
  synthetic sequence
cccgacaagtcga

SEQ ID NO: 2590 - DNA, 13 bp, Artificial Sequence
  synthetic sequence
acgatcggtcgtc

SEQ ID NO: 2591 - DNA, 13 bp, Artificial Sequence
  synthetic sequence
gtctgctgcgcgt

SEQ ID NO: 2592 - DNA, 13 bp, Artificial Sequence
  synthetic sequence
ccaaaggtctttg

SEQ ID NO: 2593 - DNA, 13 bp, Artificial Sequence
  synthetic sequence
gtctgctgagcgt

SEQ ID NO: 2594 - DNA, 13 bp, Artificial Sequence
  synthetic sequence
tccatttcatcaa

SEQ ID NO: 2595 - DNA, 13 bp, Artificial Sequence
  synthetic sequence
gccggcatggtgg

SEQ ID NO: 2596 - DNA, 13 bp, Artificial Sequence
  synthetic sequence
ggattgccgggca

SEQ ID NO: 2597 - DNA, 13 bp, Artificial Sequence
  synthetic sequence
aggcataagcctg

SEQ ID NO: 2598 - DNA, 13 bp, Artificial Sequence
  synthetic sequence
gccatgcgctccg

SEQ ID NO: 2599 - DNA, 13 bp, Artificial Sequence
  synthetic sequence
tcagctcgtacca

SEQ ID NO: 2600 - DNA, 13 bp, Artificial Sequence
  synthetic sequence
acgggcacgaagt

SEQ ID NO: 2601 - DNA, 13 bp, Artificial Sequence
  synthetic sequence
cccaccgtaaacc

SEQ ID NO: 2602 - DNA, 13 bp, Artificial Sequence
  synthetic sequence
ctccacaaacacc

SEQ ID NO: 2603 - DNA, 13 bp, Artificial Sequence
  synthetic sequence
accagacacctgg

SEQ ID NO: 2604 - DNA, 13 bp, Artificial Sequence
  synthetic sequence
cgcaggtgcaggg

SEQ ID NO: 2605 - DNA, 13 bp, Artificial Sequence
  synthetic sequence
cgagcaggcagca

SEQ ID NO: 2606 - DNA, 13 bp, Artificial Sequence
  synthetic sequence
cttcctcgatgtt

SEQ ID NO: 2607 - DNA, 13 bp, Artificial Sequence
  synthetic sequence
tcatttgtgagat

SEQ ID NO: 2608 - DNA, 13 bp, Artificial Sequence
  synthetic sequence
gggttgccaggca

SEQ ID NO: 2609 - DNA, 13 bp, Artificial Sequence
  synthetic sequence
tgatgggcttgca

SEQ ID NO: 2610 - DNA, 13 bp, Artificial Sequence
  synthetic sequence
tcctctatgttgg

SEQ ID NO: 2611 - DNA, 13 bp, Artificial Sequence
  synthetic sequence
gccatcctctcgg

SEQ ID NO: 2612 - DNA, 13 bp, Artificial Sequence
  synthetic sequence
acggggatgaaat

SEQ ID NO: 2613 - DNA, 13 bp, Artificial Sequence
  synthetic sequence
cggtgaagaactc

SEQ ID NO: 2614 - DNA, 13 bp, Artificial Sequence
  synthetic sequence
tccatctcgtcgt

SEQ ID NO: 2615 - DNA, 13 bp, Artificial Sequence
  synthetic sequence
atgacaccgtccc

SEQ ID NO: 2616 - DNA, 13 bp, Artificial Sequence
  synthetic sequence
tgatggcgtcgcg

SEQ ID NO: 2617 - DNA, 13 bp, Artificial Sequence
  synthetic sequence
ttagctcgtacca

SEQ ID NO: 2618 - DNA, 13 bp, Artificial Sequence
  synthetic sequence
gaaaagcccatgg

SEQ ID NO: 2619 - DNA, 13 bp, Artificial Sequence
  synthetic sequence
gttatggtaaggg

SEQ ID NO: 2620 - DNA, 13 bp, Artificial Sequence
  synthetic sequence
aggtggtcatata

SEQ ID NO: 2621 - DNA, 13 bp, Artificial Sequence
  synthetic sequence
gctatgaagaaga

SEQ ID NO: 2622 - DNA, 13 bp, Artificial Sequence
  synthetic sequence
gtatggcagtgac

SEQ ID NO: 2623 - DNA, 13 bp, Artificial Sequence
  synthetic sequence
gcgtccaccccag

SEQ ID NO: 2624 - DNA, 13 bp, Artificial Sequence
  synthetic sequence
gccctctcgggca

SEQ ID NO: 2625 - DNA, 13 bp, Artificial Sequence
  synthetic sequence
gttagttcgtacc

SEQ ID NO: 2626 - DNA, 13 bp, Artificial Sequence
  synthetic sequence
cgagcggggagta

SEQ ID NO: 2627 - DNA, 13 bp, Artificial Sequence
  synthetic sequence
tggtgaggcctgc

SEQ ID NO: 2628 - DNA, 13 bp, Artificial Sequence
  synthetic sequence
accttagcccaat

SEQ ID NO: 2629 - DNA, 13 bp, Artificial Sequence
  synthetic sequence
gctcgccctcaag

SEQ ID NO: 2630 - DNA, 13 bp, Artificial Sequence
  synthetic sequence
tgcagtcgatgac

SEQ ID NO: 2631 - DNA, 13 bp, Artificial Sequence
  synthetic sequence
ggctggccaaagg

SEQ ID NO: 2632 - DNA, 13 bp, Artificial Sequence
  synthetic sequence
gccatccgctctg

SEQ ID NO: 2633 - DNA, 13 bp, Artificial Sequence
  synthetic sequence
gtccagtggcgtc

SEQ ID NO: 2634 - DNA, 13 bp, Artificial Sequence
  synthetic sequence
agagaactcagca

SEQ ID NO: 2635 - DNA, 13 bp, Artificial Sequence
  synthetic sequence
ccttgatgtagca

SEQ ID NO: 2636 - DNA, 13 bp, Artificial Sequence
  synthetic sequence
gatcatagatgta

SEQ ID NO: 2637 - DNA, 13 bp, Artificial Sequence
  synthetic sequence
ccatggagtctct

SEQ ID NO: 2638 - DNA, 13 bp, Artificial Sequence
  synthetic sequence
tgcacctgggtgt

SEQ ID NO: 2639 - DNA, 13 bp, Artificial Sequence
  synthetic sequence
agatggatgaggc

SEQ ID NO: 2640 - DNA, 13 bp, Artificial Sequence
  synthetic sequence
tggaggtggatta

SEQ ID NO: 2641 - DNA, 13 bp, Artificial Sequence
  synthetic sequence
agcagtcattggt

SEQ ID NO: 2642 - DNA, 13 bp, Artificial Sequence
  synthetic sequence
aatggagtgttat

SEQ ID NO: 2643 - DNA, 13 bp, Artificial Sequence
  synthetic sequence
tgactttagccca

SEQ ID NO: 2644 - DNA, 13 bp, Artificial Sequence
  synthetic sequence
acgatgctgctgt

SEQ ID NO: 2645 - DNA, 13 bp, Artificial Sequence
  synthetic sequence
aggtgaacagttg

SEQ ID NO: 2646 - DNA, 13 bp, Artificial Sequence
  synthetic sequence
cagatgaagagga

SEQ ID NO: 2647 - DNA, 13 bp, Artificial Sequence
  synthetic sequence
cgcaagtgcatgg

SEQ ID NO: 2648 - DNA, 13 bp, Artificial Sequence
  synthetic sequence
tggtaatggtcct

SEQ ID NO: 2649 - DNA, 13 bp, Artificial Sequence
  synthetic sequence
tgaagatggatca

SEQ ID NO: 2650 - DNA, 13 bp, Artificial Sequence
  synthetic sequence
gtgggcttgagtc

SEQ ID NO: 2651 - DNA, 13 bp, Artificial Sequence
  synthetic sequence
ccgcaggtgcaag

SEQ ID NO: 2652 - DNA, 13 bp, Artificial Sequence
  synthetic sequence
cttcaagtggagg

SEQ ID NO: 2653 - DNA, 13 bp, Artificial Sequence
  synthetic sequence
gtttcagggtctc

SEQ ID NO: 2654 - DNA, 13 bp, Artificial Sequence
  synthetic sequence
gttgagtcaaaac

SEQ ID NO: 2655 - DNA, 13 bp, Artificial Sequence
  synthetic sequence
taaaaagggatct

SEQ ID NO: 2656 - DNA, 13 bp, Artificial Sequence
  synthetic sequence
agctgccaaaact

SEQ ID NO: 2657 - DNA, 13 bp, Artificial Sequence
  synthetic sequence
ggtttgaggcgga

SEQ ID NO: 2658 - DNA, 13 bp, Artificial Sequence
  synthetic sequence
gctgatagctggc

SEQ ID NO: 2659 - DNA, 13 bp, Artificial Sequence
  synthetic sequence
gttctgacacccg

SEQ ID NO: 2660 - DNA, 13 bp, Artificial Sequence
  synthetic sequence
acgccgcgcaaaa

SEQ ID NO: 2661 - DNA, 13 bp, Artificial Sequence
  synthetic sequence
acgttgagagggg

SEQ ID NO: 2662 - DNA, 13 bp, Artificial Sequence
  synthetic sequence
acctggcatggac

SEQ ID NO: 2663 - DNA, 13 bp, Artificial Sequence
  synthetic sequence
tgagggagctgag

SEQ ID NO: 2664 - DNA, 13 bp, Artificial Sequence
  synthetic sequence
gttagctcatacc

SEQ ID NO: 2665 - DNA, 13 bp, Artificial Sequence
  synthetic sequence
ggtcctgacccac

SEQ ID NO: 2666 - DNA, 13 bp, Artificial Sequence
  synthetic sequence
gtcctgaccccag

SEQ ID NO: 2667 - DNA, 13 bp, Artificial Sequence
  synthetic sequence
tggtgatggtaag

SEQ ID NO: 2668 - DNA, 13 bp, Artificial Sequence
  synthetic sequence
tctccacaggcac

SEQ ID NO: 2669 - DNA, 13 bp, Artificial Sequence
  synthetic sequence
gtgagccagggcc

SEQ ID NO: 2670 - DNA, 13 bp, Artificial Sequence
  synthetic sequence
cattctcacccca

SEQ ID NO: 2671 - DNA, 13 bp, Artificial Sequence
  synthetic sequence
cgatgaccttacc

SEQ ID NO: 2672 - DNA, 13 bp, Artificial Sequence
  synthetic sequence
tggagatggatta

SEQ ID NO: 2673 - DNA, 13 bp, Artificial Sequence
  synthetic sequence
aggtggttgtaga

SEQ ID NO: 2674 - DNA, 13 bp, Artificial Sequence
  synthetic sequence
acagagtcgaagt

SEQ ID NO: 2675 - DNA, 13 bp, Artificial Sequence
  synthetic sequence
gcgtaagccaggg

SEQ ID NO: 2676 - DNA, 13 bp, Artificial Sequence
  synthetic sequence
tagaagggaatct

SEQ ID NO: 2677 - DNA, 13 bp, Artificial Sequence
  synthetic sequence
gtggtgatagtcc

SEQ ID NO: 2678 - DNA, 13 bp, Artificial Sequence
  synthetic sequence
gccttaagatagc

SEQ ID NO: 2679 - DNA, 13 bp, Artificial Sequence
  synthetic sequence
gaggagctagcca

SEQ ID NO: 2680 - DNA, 13 bp, Artificial Sequence
  synthetic sequence
ggcgagacgatga

SEQ ID NO: 2681 - DNA, 13 bp, Artificial Sequence
  synthetic sequence
ttttgatgtggcc

SEQ ID NO: 2682 - DNA, 13 bp, Artificial Sequence
  synthetic sequence
gggttgcctggta

SEQ ID NO: 2683 - DNA, 13 bp, Artificial Sequence
  synthetic sequence
caccctgagctgt

SEQ ID NO: 2684 - DNA, 13 bp, Artificial Sequence
  synthetic sequence
tcatttttagcca

SEQ ID NO: 2685 - DNA, 13 bp, Artificial Sequence
  synthetic sequence
gctcgtggtggta

SEQ ID NO: 2686 - DNA, 13 bp, Artificial Sequence
  synthetic sequence
gcaacgaaccagc

SEQ ID NO: 2687 - DNA, 13 bp, Artificial Sequence
  synthetic sequence
gcctatggcactc

SEQ ID NO: 2688 - DNA, 13 bp, Artificial Sequence
  synthetic sequence
ggtcaccaggctc

SEQ ID NO: 2689 - DNA, 13 bp, Artificial Sequence
  synthetic sequence
atgcaaagcagaa

SEQ ID NO: 2690 - DNA, 13 bp, Artificial Sequence
  synthetic sequence
ctcgttctccccc

SEQ ID NO: 2691 - DNA, 13 bp, Artificial Sequence
  synthetic sequence
ggctaggccatcc

SEQ ID NO: 2692 - DNA, 13 bp, Artificial Sequence
  synthetic sequence
ctgagagctgact

SEQ ID NO: 2693 - DNA, 13 bp, Artificial Sequence
  synthetic sequence
taaaaggggatct

SEQ ID NO: 2694 - DNA, 13 bp, Artificial Sequence
  synthetic sequence
ggcaaggtggaca

SEQ ID NO: 2695 - DNA, 13 bp, Artificial Sequence
  synthetic sequence
tgcagtctatgac

SEQ ID NO: 2696 - DNA, 13 bp, Artificial Sequence
  synthetic sequence
tggggagcaggta

SEQ ID NO: 2697 - DNA, 13 bp, Artificial Sequence
  synthetic sequence
ccgggcagagtgg

SEQ ID NO: 2698 - DNA, 13 bp, Artificial Sequence
  synthetic sequence
acctttgcccagt

SEQ ID NO: 2699 - DNA, 13 bp, Artificial Sequence
  synthetic sequence
taggctttagccg

SEQ ID NO: 2700 - DNA, 13 bp, Artificial Sequence
  synthetic sequence
cagacagctgact

SEQ ID NO: 2701 - DNA, 13 bp, Artificial Sequence
  synthetic sequence
actccgatggtat

SEQ ID NO: 2702 - DNA, 13 bp, Artificial Sequence
  synthetic sequence
aggccggttgaca

SEQ ID NO: 2703 - DNA, 13 bp, Artificial Sequence
  synthetic sequence
atgacagcatcac

SEQ ID NO: 2704 - DNA, 13 bp, Artificial Sequence
  synthetic sequence
taggtaggcgcgc

SEQ ID NO: 2705 - DNA, 13 bp, Artificial Sequence
  synthetic sequence
agagcctgcgaca

SEQ ID NO: 2706 - DNA, 13 bp, Artificial Sequence
  synthetic sequence
gccggtaggtcgg

SEQ ID NO: 2707 - DNA, 13 bp, Artificial Sequence
  synthetic sequence
agcagaggtgttg

SEQ ID NO: 2708 - DNA, 13 bp, Artificial Sequence
  synthetic sequence
cgtagggacgccg

SEQ ID NO: 2709 - DNA, 13 bp, Artificial Sequence
  synthetic sequence
gggaacttcttgg

SEQ ID NO: 2710 - DNA, 13 bp, Artificial Sequence
  synthetic sequence
cagtcgttggtaa

SEQ ID NO: 2711 - DNA, 13 bp, Artificial Sequence
  synthetic sequence
cccaagcggacgt

SEQ ID NO: 2712 - DNA, 13 bp, Artificial Sequence
  synthetic sequence
agggatgtcacag

SEQ ID NO: 2713 - DNA, 13 bp, Artificial Sequence
  synthetic sequence
gaccttggcccac

SEQ ID NO: 2714 - DNA, 13 bp, Artificial Sequence
  synthetic sequence
agaagggtatttc

SEQ ID NO: 2715 - DNA, 13 bp, Artificial Sequence
  synthetic sequence
gcaatcattagtg

SEQ ID NO: 2716 - DNA, 13 bp, Artificial Sequence
  synthetic sequence
tattctcttcctg

SEQ ID NO: 2717 - DNA, 13 bp, Artificial Sequence
  synthetic sequence
ggcagggtggaca

SEQ ID NO: 2718 - DNA, 13 bp, Artificial Sequence
  synthetic sequence
cctgacgagttga

SEQ ID NO: 2719 - DNA, 13 bp, Artificial Sequence
  synthetic sequence
aggtgaacatctg

SEQ ID NO: 2720 - DNA, 13 bp, Artificial Sequence
  synthetic sequence
catgattttgaag

SEQ ID NO: 2721 - DNA, 13 bp, Artificial Sequence
  synthetic sequence
tttttgccatgac

SEQ ID NO: 2722 - DNA, 13 bp, Artificial Sequence
  synthetic sequence
ggccgaaggtctt

SEQ ID NO: 2723 - DNA, 13 bp, Artificial Sequence
  synthetic sequence
gggtcgcgggtca

SEQ ID NO: 2724 - DNA, 13 bp, Artificial Sequence
  synthetic sequence
ctgaggagttgaa

SEQ ID NO: 2725 - DNA, 13 bp, Artificial Sequence
  synthetic sequence
gccttcaggtagc

SEQ ID NO: 2726 - DNA, 13 bp, Artificial Sequence
  synthetic sequence
ggtcgtagatgta

SEQ ID NO: 2727 - DNA, 13 bp, Artificial Sequence
  synthetic sequence
catgggcaggtgg

SEQ ID NO: 2728 - DNA, 13 bp, Artificial Sequence
  synthetic sequence
gttgggtcacacg

SEQ ID NO: 2729 - DNA, 13 bp, Artificial Sequence
  synthetic sequence
aatgacggcgggg

SEQ ID NO: 2730 - DNA, 13 bp, Artificial Sequence
  synthetic sequence
ctaaaggcctgga

SEQ ID NO: 2731 - DNA, 13 bp, Artificial Sequence
  synthetic sequence
cattcttgacgtg

SEQ ID NO: 2732 - DNA, 13 bp, Artificial Sequence
  synthetic sequence
tctctagtcaggt

SEQ ID NO: 2733 - DNA, 13 bp, Artificial Sequence
  synthetic sequence
gcctgtgacactc

SEQ ID NO: 2734 - DNA, 13 bp, Artificial Sequence
  synthetic sequence
gccatgcgctctg

SEQ ID NO: 2735 - DNA, 13 bp, Artificial Sequence
  synthetic sequence
tacagtcgatgac

SEQ ID NO: 2736 - DNA, 13 bp, Artificial Sequence
  synthetic sequence
tcactttcttttg

SEQ ID NO: 2737 - DNA, 13 bp, Artificial Sequence
  synthetic sequence
tgagccaagggcc

SEQ ID NO: 2738 - DNA, 13 bp, Artificial Sequence
  synthetic sequence
acgttgcagtcaa

SEQ ID NO: 2739 - DNA, 13 bp, Artificial Sequence
  synthetic sequence
acctttgcccacg

SEQ ID NO: 2740 - DNA, 13 bp, Artificial Sequence
  synthetic sequence
gccctttcgggca

SEQ ID NO: 2741 - DNA, 13 bp, Artificial Sequence
  synthetic sequence
tcagtgaaaaact

SEQ ID NO: 2742 - DNA, 13 bp, Artificial Sequence
  synthetic sequence
gcagtggagtaag

SEQ ID NO: 2743 - DNA, 13 bp, Artificial Sequence
  synthetic sequence
ctgaaccacactt

SEQ ID NO: 2744 - DNA, 13 bp, Artificial Sequence
  synthetic sequence
tcgaaagtcacct

SEQ ID NO: 2745 - DNA, 13 bp, Artificial Sequence
  synthetic sequence
agaaggggatttc

SEQ ID NO: 2746 - DNA, 13 bp, Artificial Sequence
  synthetic sequence
gcctgtggcactc

SEQ ID NO: 2747 - DNA, 13 bp, Artificial Sequence
  synthetic sequence
tccgcagaatctc

SEQ ID NO: 2748 - DNA, 13 bp, Artificial Sequence
  synthetic sequence
cgggtaaggtgga

SEQ ID NO: 2749 - DNA, 13 bp, Artificial Sequence
  synthetic sequence
catttcgtcaaac

SEQ ID NO: 2750 - DNA, 13 bp, Artificial Sequence
  synthetic sequence
tggcgtaccagaa

SEQ ID NO: 2751 - DNA, 13 bp, Artificial Sequence
  synthetic sequence
gtaggtttgagcc

SEQ ID NO: 2752 - DNA, 13 bp, Artificial Sequence
  synthetic sequence
tatgaaaacccca

SEQ ID NO: 2753 - DNA, 13 bp, Artificial Sequence
  synthetic sequence
ctttgagatagca

SEQ ID NO: 2754 - DNA, 13 bp, Artificial Sequence
  synthetic sequence
tctgctgagcata

SEQ ID NO: 2755 - DNA, 13 bp, Artificial Sequence
  synthetic sequence
ctgtcaaatgtga

SEQ ID NO: 2756 - DNA, 13 bp, Artificial Sequence
  synthetic sequence
actttggcccaat

SEQ ID NO: 2757 - DNA, 13 bp, Artificial Sequence
  synthetic sequence
cccaccaccagcc

SEQ ID NO: 2758 - DNA, 13 bp, Artificial Sequence
  synthetic sequence
ccgcaagtgcagg

SEQ ID NO: 2759 - DNA, 13 bp, Artificial Sequence
  synthetic sequence
cgggatttcccgg

SEQ ID NO: 2760 - DNA, 13 bp, Artificial Sequence
  synthetic sequence
acctcggtgaaaa

SEQ ID NO: 2761 - DNA, 13 bp, Artificial Sequence
  synthetic sequence
tgttgggagtagg

SEQ ID NO: 2762 - DNA, 13 bp, Artificial Sequence
  synthetic sequence
gacaatcattggt

SEQ ID NO: 2763 - DNA, 13 bp, Artificial Sequence
  synthetic sequence
gacaaagcgggca

SEQ ID NO: 2764 - DNA, 13 bp, Artificial Sequence
  synthetic sequence
accacccctaacc

SEQ ID NO: 2765 - DNA, 13 bp, Artificial Sequence
  synthetic sequence
acagtggtctctg

SEQ ID NO: 2766 - DNA, 13 bp, Artificial Sequence
  synthetic sequence
gcggtgatggggg

SEQ ID NO: 2767 - DNA, 13 bp, Artificial Sequence
  synthetic sequence
ccagagctgttaa

SEQ ID NO: 2768 - DNA, 13 bp, Artificial Sequence
  synthetic sequence
tgccccacaagga

SEQ ID NO: 2769 - DNA, 13 bp, Artificial Sequence
  synthetic sequence
ctctcaattatgg

SEQ ID NO: 2770 - DNA, 13 bp, Artificial Sequence
  synthetic sequence
ctaagatggagcc

SEQ ID NO: 2771 - DNA, 13 bp, Artificial Sequence
  synthetic sequence
taagcctgttggg

SEQ ID NO: 2772 - DNA, 13 bp, Artificial Sequence
  synthetic sequence
ccccagttgtacg

SEQ ID NO: 2773 - DNA, 13 bp, Artificial Sequence
  synthetic sequence
agcgagctccgcc

SEQ ID NO: 2774 - DNA, 13 bp, Artificial Sequence
  synthetic sequence
catcacggccccc

SEQ ID NO: 2775 - DNA, 13 bp, Artificial Sequence
  synthetic sequence
gctgagtgatggt

SEQ ID NO: 2776 - DNA, 13 bp, Artificial Sequence
  synthetic sequence
aggtggtcataca

SEQ ID NO: 2777 - DNA, 13 bp, Artificial Sequence
  synthetic sequence
agtaagctggtga

SEQ ID NO: 2778 - DNA, 13 bp, Artificial Sequence
  synthetic sequence
ccgtggagttgaa

SEQ ID NO: 2779 - DNA, 13 bp, Artificial Sequence
  synthetic sequence
acacagatgaaaa

SEQ ID NO: 2780 - DNA, 13 bp, Artificial Sequence
  synthetic sequence
acagctggcttgc

SEQ ID NO: 2781 - DNA, 13 bp, Artificial Sequence
  synthetic sequence
ccttaaggtagca

SEQ ID NO: 2782 - DNA, 13 bp, Artificial Sequence
  synthetic sequence
gagcttggctgct

SEQ ID NO: 2783 - DNA, 13 bp, Artificial Sequence
  synthetic sequence
ggctaggccaccc

SEQ ID NO: 2784 - DNA, 13 bp, Artificial Sequence
  synthetic sequence
agatgaaaaacca

SEQ ID NO: 2785 - DNA, 13 bp, Artificial Sequence
  synthetic sequence
ccttaaaggccac

SEQ ID NO: 2786 - DNA, 13 bp, Artificial Sequence
  synthetic sequence
tggcagcgagtgt

SEQ ID NO: 2787 - DNA, 13 bp, Artificial Sequence
  synthetic sequence
tagaagggtatct

SEQ ID NO: 2788 - DNA, 13 bp, Artificial Sequence
  synthetic sequence
gctggcatagtgg

SEQ ID NO: 2789 - DNA, 13 bp, Artificial Sequence
  synthetic sequence
ggattacctggca

SEQ ID NO: 2790 - DNA, 13 bp, Artificial Sequence
  synthetic sequence
cccgacgagttga

SEQ ID NO: 2791 - DNA, 13 bp, Artificial Sequence
  synthetic sequence
gcaggcgcacggt

SEQ ID NO: 2792 - DNA, 13 bp, Artificial Sequence
  synthetic sequence
gcagcagatgaaa

SEQ ID NO: 2793 - DNA, 13 bp, Artificial Sequence
  synthetic sequence
gcaggatctccgc

SEQ ID NO: 2794 - DNA, 13 bp, Artificial Sequence
  synthetic sequence
tcagctcatacca

SEQ ID NO: 2795 - DNA, 13 bp, Artificial Sequence
  synthetic sequence
gggttccccggca

SEQ ID NO: 2796 - DNA, 13 bp, Artificial Sequence
  synthetic sequence
aggtggtcgtata

SEQ ID NO: 2797 - DNA, 13 bp, Artificial Sequence
  synthetic sequence
tgggagacgagga

SEQ ID NO: 2798 - DNA, 13 bp, Artificial Sequence
  synthetic sequence
tgaccttcttttg

SEQ ID NO: 2799 - DNA, 13 bp, Artificial Sequence
  synthetic sequence
acgttacagtcaa

SEQ ID NO: 2800 - DNA, 13 bp, Artificial Sequence
  synthetic sequence
gaagaactggcca

SEQ ID NO: 2801 - DNA, 13 bp, Artificial Sequence
  synthetic sequence
taggagaacccca

SEQ ID NO: 2802 - DNA, 13 bp, Artificial Sequence
  synthetic sequence
ccgcaagtgcacg

SEQ ID NO: 2803 - DNA, 13 bp, Artificial Sequence
  synthetic sequence
agtgtttagctcc

SEQ ID NO: 2804 - DNA, 13 bp, Artificial Sequence
  synthetic sequence
ggcgtaagccaag

SEQ ID NO: 2805 - DNA, 13 bp, Artificial Sequence
  synthetic sequence
gggaagtcacagt

SEQ ID NO: 2806 - DNA, 13 bp, Artificial Sequence
  synthetic sequence
tttttgacgtggc

SEQ ID NO: 2807 - DNA, 13 bp, Artificial Sequence
  synthetic sequence
gctgtggccttga

SEQ ID NO: 2808 - DNA, 13 bp, Artificial Sequence
  synthetic sequence
tacacccttttgc

SEQ ID NO: 2809 - DNA, 13 bp, Artificial Sequence
  synthetic sequence
gccataatggtgg

SEQ ID NO: 2810 - DNA, 13 bp, Artificial Sequence
  synthetic sequence
gccatgagggaag

SEQ ID NO: 2811 - DNA, 13 bp, Artificial Sequence
  synthetic sequence
agatggtcatata

SEQ ID NO: 2812 - DNA, 13 bp, Artificial Sequence
  synthetic sequence
actgagtcgaagt

SEQ ID NO: 2813 - DNA, 13 bp, Artificial Sequence
  synthetic sequence
gttcgccctcaag

SEQ ID NO: 2814 - DNA, 13 bp, Artificial Sequence
  synthetic sequence
tgggctgcgagca

SEQ ID NO: 2815 - DNA, 13 bp, Artificial Sequence
  synthetic sequence
aaatgtcaccttc

SEQ ID NO: 2816 - DNA, 13 bp, Artificial Sequence
  synthetic sequence
ctcgccgaggaac

SEQ ID NO: 2817 - DNA, 13 bp, Artificial Sequence
  synthetic sequence
gtggtctatggca

SEQ ID NO: 2818 - DNA, 13 bp, Artificial Sequence
  synthetic sequence
aagcctcgagttt

SEQ ID NO: 2819 - DNA, 13 bp, Artificial Sequence
  synthetic sequence
cggccgacgattc

SEQ ID NO: 2820 - DNA, 13 bp, Artificial Sequence
  synthetic sequence
tccatgttctcca

SEQ ID NO: 2821 - DNA, 13 bp, Artificial Sequence
  synthetic sequence
actggtgatctca

SEQ ID NO: 2822 - DNA, 13 bp, Artificial Sequence
  synthetic sequence
gtttgctgggcat

SEQ ID NO: 2823 - DNA, 13 bp, Artificial Sequence
  synthetic sequence
cagtaatgggagc

SEQ ID NO: 2824 - DNA, 13 bp, Artificial Sequence
  synthetic sequence
gcagaatttccgc

SEQ ID NO: 2825 - DNA, 13 bp, Artificial Sequence
  synthetic sequence
cggcgcccactgt

SEQ ID NO: 2826 - DNA, 13 bp, Artificial Sequence
  synthetic sequence
gcaggatttccgc

SEQ ID NO: 2827 - DNA, 13 bp, Artificial Sequence
  synthetic sequence
ccggtgcggatgt

SEQ ID NO: 2828 - DNA, 13 bp, Artificial Sequence
  synthetic sequence
ctggctccccctc

SEQ ID NO: 2829 - DNA, 13 bp, Artificial Sequence
  synthetic sequence
gggcatccggacg

SEQ ID NO: 2830 - DNA, 13 bp, Artificial Sequence
  synthetic sequence
gcagaggagctgg

SEQ ID NO: 2831 - DNA, 13 bp, Artificial Sequence
  synthetic sequence
tgtcatatgagaa

SEQ ID NO: 2832 - DNA, 13 bp, Artificial Sequence
  synthetic sequence
aagcctgcgacac

SEQ ID NO: 2833 - DNA, 13 bp, Artificial Sequence
  synthetic sequence
gagccacaccgag

SEQ ID NO: 2834 - DNA, 13 bp, Artificial Sequence
  synthetic sequence
gtaggcttgagtc

SEQ ID NO: 2835 - DNA, 13 bp, Artificial Sequence
  synthetic sequence
accttcgcccaat

SEQ ID NO: 2836 - DNA, 13 bp, Artificial Sequence
  synthetic sequence
tttttctggcgca

SEQ ID NO: 2837 - DNA, 13 bp, Artificial Sequence
  synthetic sequence
gccgtgatgggag

SEQ ID NO: 2838 - DNA, 13 bp, Artificial Sequence
  synthetic sequence
ccacgcagatgaa

SEQ ID NO: 2839 - DNA, 13 bp, Artificial Sequence
  synthetic sequence
gacaaggctggca

SEQ ID NO: 2840 - DNA, 13 bp, Artificial Sequence
  synthetic sequence
tgatcaagtactc

SEQ ID NO: 2841 - DNA, 13 bp, Artificial Sequence
  synthetic sequence
aatgatggaacat

SEQ ID NO: 2842 - DNA, 13 bp, Artificial Sequence
  synthetic sequence
cattttctcccca

SEQ ID NO: 2843 - DNA, 13 bp, Artificial Sequence
  synthetic sequence
gtgctggccatcc

SEQ ID NO: 2844 - DNA, 13 bp, Artificial Sequence
  synthetic sequence
ctgccacgaacca

SEQ ID NO: 2845 - DNA, 13 bp, Artificial Sequence
  synthetic sequence
aagaactctggtg

SEQ ID NO: 2846 - DNA, 13 bp, Artificial Sequence
  synthetic sequence
gtgaagaattcag

SEQ ID NO: 2847 - DNA, 13 bp, Artificial Sequence
  synthetic sequence
gtggtcacagtcc

SEQ ID NO: 2848 - DNA, 13 bp, Artificial Sequence
  synthetic sequence
gcgtatgctgtga

SEQ ID NO: 2849 - DNA, 13 bp, Artificial Sequence
  synthetic sequence
ttggccatgatag

SEQ ID NO: 2850 - DNA, 13 bp, Artificial Sequence
  synthetic sequence
gggcagtcattag

SEQ ID NO: 2851 - DNA, 13 bp, Artificial Sequence
  synthetic sequence
gtggtctgtggca

SEQ ID NO: 2852 - DNA, 13 bp, Artificial Sequence
  synthetic sequence
cggccgacgatcc

SEQ ID NO: 2853 - DNA, 13 bp, Artificial Sequence
  synthetic sequence
agatggtcataca

SEQ ID NO: 2854 - DNA, 13 bp, Artificial Sequence
  synthetic sequence
actttagcccagt

SEQ ID NO: 2855 - DNA, 13 bp, Artificial Sequence
  synthetic sequence
tcttcacatggcc

SEQ ID NO: 2856 - DNA, 13 bp, Artificial Sequence
  synthetic sequence
aggaggggagtgg

SEQ ID NO: 2857 - DNA, 13 bp, Artificial Sequence
  synthetic sequence
ggattgccaggca

SEQ ID NO: 2858 - DNA, 13 bp, Artificial Sequence
  synthetic sequence
ggccaaaggactt

SEQ ID NO: 2859 - DNA, 13 bp, Artificial Sequence
  synthetic sequence
gtgtcaatgagcg

SEQ ID NO: 2860 - DNA, 13 bp, Artificial Sequence
  synthetic sequence
gaagagctggcct

SEQ ID NO: 2861 - DNA, 13 bp, Artificial Sequence
  synthetic sequence
gcacgcacaccca

SEQ ID NO: 2862 - DNA, 13 bp, Artificial Sequence
  synthetic sequence
acttttagccagt

SEQ ID NO: 2863 - DNA, 13 bp, Artificial Sequence
  synthetic sequence
ctttcacgtagca

SEQ ID NO: 2864 - DNA, 13 bp, Artificial Sequence
  synthetic sequence
catcacggccacc

SEQ ID NO: 2865 - DNA, 13 bp, Artificial Sequence
  synthetic sequence
agctttgcagctc

SEQ ID NO: 2866 - DNA, 13 bp, Artificial Sequence
  synthetic sequence
gccgcttgagctt

SEQ ID NO: 2867 - DNA, 13 bp, Artificial Sequence
  synthetic sequence
tggaggtgtatga

SEQ ID NO: 2868 - DNA, 13 bp, Artificial Sequence
  synthetic sequence
tcatttgtgatgt

SEQ ID NO: 2869 - DNA, 13 bp, Artificial Sequence
  synthetic sequence
ggccaaagctctt

SEQ ID NO: 2870 - DNA, 13 bp, Artificial Sequence
  synthetic sequence
gtctgctgagtgt

SEQ ID NO: 2871 - DNA, 13 bp, Artificial Sequence
  synthetic sequence
cccgtccaagcgt

SEQ ID NO: 2872 - DNA, 13 bp, Artificial Sequence
  synthetic sequence
tcaaccaagcacc

SEQ ID NO: 2873 - DNA, 13 bp, Artificial Sequence
  synthetic sequence
gcgatcggtcgtc

SEQ ID NO: 2874 - DNA, 13 bp, Artificial Sequence
  synthetic sequence
acagtcattggtg

SEQ ID NO: 2875 - DNA, 13 bp, Artificial Sequence
  synthetic sequence
gccagagccgcac

SEQ ID NO: 2876 - DNA, 13 bp, Artificial Sequence
  synthetic sequence
ggtatgaagtcaa

SEQ ID NO: 2877 - DNA, 13 bp, Artificial Sequence
  synthetic sequence
cgccgcatgggca

SEQ ID NO: 2878 - DNA, 13 bp, Artificial Sequence
  synthetic sequence
tggccgacaagaa

SEQ ID NO: 2879 - DNA, 13 bp, Artificial Sequence
  synthetic sequence
ccccagttgtatg

SEQ ID NO: 2880 - DNA, 13 bp, Artificial Sequence
  synthetic sequence
gctgacaactggc

SEQ ID NO: 2881 - DNA, 13 bp, Artificial Sequence
  synthetic sequence
tcaactcatacca

SEQ ID NO: 2882 - DNA, 13 bp, Artificial Sequence
  synthetic sequence
actgtggtctcag

SEQ ID NO: 2883 - DNA, 13 bp, Artificial Sequence
  synthetic sequence
gttgtaaaggagc

SEQ ID NO: 2884 - DNA, 13 bp, Artificial Sequence
  synthetic sequence
cccggagtctcac

SEQ ID NO: 2885 - DNA, 13 bp, Artificial Sequence
  synthetic sequence
aggttaccttctt

SEQ ID NO: 2886 - DNA, 13 bp, Artificial Sequence
  synthetic sequence
ttagagtccgaat

SEQ ID NO: 2887 - DNA, 13 bp, Artificial Sequence
  synthetic sequence
cctgaccgtatgt

SEQ ID NO: 2888 - DNA, 13 bp, Artificial Sequence
  synthetic sequence
gttaaccaaggcc

SEQ ID NO: 2889 - DNA, 13 bp, Artificial Sequence
  synthetic sequence
accaggcacagca

SEQ ID NO: 2890 - DNA, 13 bp, Artificial Sequence
  synthetic sequence
tagaaaggcacct

SEQ ID NO: 2891 - DNA, 13 bp, Artificial Sequence
  synthetic sequence
cagaggagctagc

SEQ ID NO: 2892 - DNA, 13 bp, Artificial Sequence
  synthetic sequence
aaggtgaaaagct

SEQ ID NO: 2893 - DNA, 13 bp, Artificial Sequence
  synthetic sequence
aaggatggaacat

SEQ ID NO: 2894 - DNA, 13 bp, Artificial Sequence
  synthetic sequence
tttttgccatgat

SEQ ID NO: 2895 - DNA, 13 bp, Artificial Sequence
  synthetic sequence
tgtgccttcagat

SEQ ID NO: 2896 - DNA, 13 bp, Artificial Sequence
  synthetic sequence
gacggaggggagc

SEQ ID NO: 2897 - DNA, 13 bp, Artificial Sequence
  synthetic sequence
cctttcaattatg

SEQ ID NO: 2898 - DNA, 13 bp, Artificial Sequence
  synthetic sequence
ggctcaccctcaa

SEQ ID NO: 2899 - DNA, 13 bp, Artificial Sequence
  synthetic sequence
ggcaacgcgagga

SEQ ID NO: 2900 - DNA, 13 bp, Artificial Sequence
  synthetic sequence
gggttaccaggca

SEQ ID NO: 2901 - DNA, 13 bp, Artificial Sequence
  synthetic sequence
aggggacctctcc

SEQ ID NO: 2902 - DNA, 13 bp, Artificial Sequence
  synthetic sequence
agtccgagccggg

SEQ ID NO: 2903 - DNA, 13 bp, Artificial Sequence
  synthetic sequence
atgtcccccccgc

SEQ ID NO: 2904 - DNA, 13 bp, Artificial Sequence
  synthetic sequence
tagacccttttgc

SEQ ID NO: 2905 - DNA, 13 bp, Artificial Sequence
  synthetic sequence
aagcaggagtagg

SEQ ID NO: 2906 - DNA, 13 bp, Artificial Sequence
  synthetic sequence
gcaggatttctgc

SEQ ID NO: 2907 - DNA, 13 bp, Artificial Sequence
  synthetic sequence
acggagtcgaagt

SEQ ID NO: 2908 - DNA, 13 bp, Artificial Sequence
  synthetic sequence
gtggtaaaggagc

SEQ ID NO: 2909 - DNA, 13 bp, Artificial Sequence
  synthetic sequence
ttgggtctctggt

SEQ ID NO: 2910 - DNA, 13 bp, Artificial Sequence
  synthetic sequence
cgatggcattcag

SEQ ID NO: 2911 - DNA, 13 bp, Artificial Sequence
  synthetic sequence
tgaagagctgccc

SEQ ID NO: 2912 - DNA, 13 bp, Artificial Sequence
  synthetic sequence
catggagtgagaa

SEQ ID NO: 2913 - DNA, 13 bp, Artificial Sequence
  synthetic sequence
tggtgagggagcc

SEQ ID NO: 2914 - DNA, 13 bp, Artificial Sequence
  synthetic sequence
gtgatagcgcccc

SEQ ID NO: 2915 - DNA, 13 bp, Artificial Sequence
  synthetic sequence
tctccgctggtgt

SEQ ID NO: 2916 - DNA, 13 bp, Artificial Sequence
  synthetic sequence
ggtgaatcaagcc

SEQ ID NO: 2917 - DNA, 13 bp, Artificial Sequence
  synthetic sequence
tgacgatgacctt

SEQ ID NO: 2918 - DNA, 13 bp, Artificial Sequence
  synthetic sequence
gcttgagacggat

SEQ ID NO: 2919 - DNA, 13 bp, Artificial Sequence
  synthetic sequence
ctttgatgtaaca

SEQ ID NO: 2920 - DNA, 13 bp, Artificial Sequence
  synthetic sequence
ccttcacatagca

SEQ ID NO: 2921 - DNA, 13 bp, Artificial Sequence
  synthetic sequence
ggcagggtggata

SEQ ID NO: 2922 - DNA, 13 bp, Artificial Sequence
  synthetic sequence
gccgatagctggc

SEQ ID NO: 2923 - DNA, 13 bp, Artificial Sequence
  synthetic sequence
tagtgatggtaag

SEQ ID NO: 2924 - DNA, 13 bp, Artificial Sequence
  synthetic sequence
ggccgaagctctt

SEQ ID NO: 2925 - DNA, 13 bp, Artificial Sequence
  synthetic sequence
tgaacatttggcc

SEQ ID NO: 2926 - DNA, 13 bp, Artificial Sequence
  synthetic sequence
gagtcaaaatcgc

SEQ ID NO: 2927 - DNA, 13 bp, Artificial Sequence
  synthetic sequence
ggatgacagcgtc

SEQ ID NO: 2928 - DNA, 13 bp, Artificial Sequence
  synthetic sequence
ccgtggagtcgtt

SEQ ID NO: 2929 - DNA, 13 bp, Artificial Sequence
  synthetic sequence
gacagggcgggca

SEQ ID NO: 2930 - DNA, 13 bp, Artificial Sequence
  synthetic sequence
cgcgcacacccaa

SEQ ID NO: 2931 - DNA, 13 bp, Artificial Sequence
  synthetic sequence
gagcaatcgttgg

SEQ ID NO: 2932 - DNA, 13 bp, Artificial Sequence
  synthetic sequence
gtttcttgaagca

SEQ ID NO: 2933 - DNA, 13 bp, Artificial Sequence
  synthetic sequence
gaggcagggccaa

SEQ ID NO: 2934 - DNA, 13 bp, Artificial Sequence
  synthetic sequence
ccaggttccccct

SEQ ID NO: 2935 - DNA, 13 bp, Artificial Sequence
  synthetic sequence
tgagcataggctt

SEQ ID NO: 2936 - DNA, 13 bp, Artificial Sequence
  synthetic sequence
cacaccgctggta

SEQ ID NO: 2937 - DNA, 13 bp, Artificial Sequence
  synthetic sequence
gccctctggggca

SEQ ID NO: 2938 - DNA, 13 bp, Artificial Sequence
  synthetic sequence
actttggcccagt

SEQ ID NO: 2939 - DNA, 13 bp, Artificial Sequence
  synthetic sequence
tattctgatggta

SEQ ID NO: 2940 - DNA, 13 bp, Artificial Sequence
  synthetic sequence
acgatccctgcag

SEQ ID NO: 2941 - DNA, 13 bp, Artificial Sequence
  synthetic sequence
cacaagtgcatgg

SEQ ID NO: 2942 - DNA, 13 bp, Artificial Sequence
  synthetic sequence
ccgacgagctggc

SEQ ID NO: 2943 - DNA, 13 bp, Artificial Sequence
  synthetic sequence
tggttgtaaatgt

SEQ ID NO: 2944 - DNA, 13 bp, Artificial Sequence
  synthetic sequence
ctgttgacaatgc

SEQ ID NO: 2945 - DNA, 13 bp, Artificial Sequence
  synthetic sequence
accgtggtctcag

SEQ ID NO: 2946 - DNA, 13 bp, Artificial Sequence
  synthetic sequence
ccgctagggcttt

SEQ ID NO: 2947 - DNA, 13 bp, Artificial Sequence
  synthetic sequence
agggaggggaccc

SEQ ID NO: 2948 - DNA, 13 bp, Artificial Sequence
  synthetic sequence
gccatggaggccc

SEQ ID NO: 2949 - DNA, 13 bp, Artificial Sequence
  synthetic sequence
caaccaacccctt

SEQ ID NO: 2950 - DNA, 13 bp, Artificial Sequence
  synthetic sequence
tgatttcgtcggc

SEQ ID NO: 2951 - DNA, 13 bp, Artificial Sequence
  synthetic sequence
catcgcccatggg

SEQ ID NO: 2952 - DNA, 13 bp, Artificial Sequence
  synthetic sequence
ctgttgatatgaa

SEQ ID NO: 2953 - DNA, 13 bp, Artificial Sequence
  synthetic sequence
agaggcttgaggc

SEQ ID NO: 2954 - DNA, 13 bp, Artificial Sequence
  synthetic sequence
actgttttgatgg

SEQ ID NO: 2955 - DNA, 13 bp, Artificial Sequence
  synthetic sequence
catgcgctctcgg

SEQ ID NO: 2956 - DNA, 13 bp, Artificial Sequence
  synthetic sequence
agtttgatagcac

SEQ ID NO: 2957 - DNA, 13 bp, Artificial Sequence
  synthetic sequence
gggaggctggcac

SEQ ID NO: 2958 - DNA, 13 bp, Artificial Sequence
  synthetic sequence
gggcaggagtgca

SEQ ID NO: 2959 - DNA, 13 bp, Artificial Sequence
  synthetic sequence
tccctgccattga

SEQ ID NO: 2960 - DNA, 13 bp, Artificial Sequence
  synthetic sequence
aaccctggtgcga

SEQ ID NO: 2961 - DNA, 13 bp, Artificial Sequence
  synthetic sequence
acatttcatgccg

SEQ ID NO: 2962 - DNA, 13 bp, Artificial Sequence
  synthetic sequence
agggtgatgattc

SEQ ID NO: 2963 - DNA, 13 bp, Artificial Sequence
  synthetic sequence
tgcgaaagttaac

SEQ ID NO: 2964 - DNA, 13 bp, Artificial Sequence
  synthetic sequence
gggaacactaaca

SEQ ID NO: 2965 - DNA, 13 bp, Artificial Sequence
  synthetic sequence
tggaggttgagca

SEQ ID NO: 2966 - DNA, 13 bp, Artificial Sequence
  synthetic sequence
gctgagtatgatc

SEQ ID NO: 2967 - DNA, 13 bp, Artificial Sequence
  synthetic sequence
tggagcttgagca

SEQ ID NO: 2968 - DNA, 13 bp, Artificial Sequence
  synthetic sequence
ctgagcagctgcg

SEQ ID NO: 2969 - DNA, 13 bp, Artificial Sequence
  synthetic sequence
tataaccatgatg

SEQ ID NO: 2970 - DNA, 13 bp, Artificial Sequence
  synthetic sequence
ctgaggacacggc

SEQ ID NO: 2971 - DNA, 13 bp, Artificial Sequence
  synthetic sequence
tgtttgagtcaga

SEQ ID NO: 2972 - DNA, 13 bp, Artificial Sequence
  synthetic sequence
cctctgtgatacc

SEQ ID NO: 2973 - DNA, 13 bp, Artificial Sequence
  synthetic sequence
tttggaatcatcc

SEQ ID NO: 2974 - DNA, 13 bp, Artificial Sequence
  synthetic sequence
gggaggctggtac

SEQ ID NO: 2975 - DNA, 13 bp, Artificial Sequence
  synthetic sequence
ccgtgcgtaagcc

SEQ ID NO: 2976 - DNA, 13 bp, Artificial Sequence
  synthetic sequence
ttactgccggggt

SEQ ID NO: 2977 - DNA, 13 bp, Artificial Sequence
  synthetic sequence
cgtatggcggcac

SEQ ID NO: 2978 - DNA, 13 bp, Artificial Sequence
  synthetic sequence
gttatgagttccg

SEQ ID NO: 2979 - DNA, 13 bp, Artificial Sequence
  synthetic sequence
cctggatccgcac

SEQ ID NO: 2980 - DNA, 13 bp, Artificial Sequence
  synthetic sequence
catatctgggacc

SEQ ID NO: 2981 - DNA, 13 bp, Artificial Sequence
  synthetic sequence
ctgccgagtatga

SEQ ID NO: 2982 - DNA, 13 bp, Artificial Sequence
  synthetic sequence
agcggaaggccgt

SEQ ID NO: 2983 - DNA, 13 bp, Artificial Sequence
  synthetic sequence
atttgacacctgg

SEQ ID NO: 2984 - DNA, 13 bp, Artificial Sequence
  synthetic sequence
aggctcctggcat

SEQ ID NO: 2985 - DNA, 13 bp, Artificial Sequence
  synthetic sequence
acaacaggtgaga

SEQ ID NO: 2986 - DNA, 13 bp, Artificial Sequence
  synthetic sequence
cttcatgcggtgg

SEQ ID NO: 2987 - DNA, 13 bp, Artificial Sequence
  synthetic sequence
tttctgagtttga

SEQ ID NO: 2988 - DNA, 13 bp, Artificial Sequence
  synthetic sequence
ctgatgttaggat

SEQ ID NO: 2989 - DNA, 13 bp, Artificial Sequence
  synthetic sequence
atttgacacccgg

SEQ ID NO: 2990 - DNA, 13 bp, Artificial Sequence
  synthetic sequence
tgcttcgacgggt

SEQ ID NO: 2991 - DNA, 13 bp, Artificial Sequence
  synthetic sequence
tatcaacatctcc

SEQ ID NO: 2992 - DNA, 13 bp, Artificial Sequence
  synthetic sequence
tggaaccacccaa

SEQ ID NO: 2993 - DNA, 13 bp, Artificial Sequence
  synthetic sequence
tccccgcttacgt

SEQ ID NO: 2994 - DNA, 13 bp, Artificial Sequence
  synthetic sequence
atgctgtcccggt

SEQ ID NO: 2995 - DNA, 13 bp, Artificial Sequence
  synthetic sequence
acctgctcccgcc

SEQ ID NO: 2996 - DNA, 13 bp, Artificial Sequence
  synthetic sequence
accctggtgcaat

SEQ ID NO: 2997 - DNA, 13 bp, Artificial Sequence
  synthetic sequence
agaggctcgaggc

SEQ ID NO: 2998 - DNA, 13 bp, Artificial Sequence
  synthetic sequence
ttatgaagtggct

SEQ ID NO: 2999 - DNA, 13 bp, Artificial Sequence
  synthetic sequence
tttaagggggatg

SEQ ID NO: 3000 - DNA, 13 bp, Artificial Sequence
  synthetic sequence
cgacagaattaat

SEQ ID NO: 3001 - DNA, 13 bp, Artificial Sequence
  synthetic sequence
atccccgccattg

SEQ ID NO: 3002 - DNA, 13 bp, Artificial Sequence
  synthetic sequence
gagtacgaccaga

SEQ ID NO: 3003 - DNA, 13 bp, Artificial Sequence
  synthetic sequence
tgtggaatcaccc

SEQ ID NO: 3004 - DNA, 13 bp, Artificial Sequence
  synthetic sequence
tttttgagtctga

SEQ ID NO: 3005 - DNA, 13 bp, Artificial Sequence
  synthetic sequence
gcacggccaacct

SEQ ID NO: 3006 - DNA, 13 bp, Artificial Sequence
  synthetic sequence
tgaattccatcac

SEQ ID NO: 3007 - DNA, 13 bp, Artificial Sequence
  synthetic sequence
acaaccatgacgt

SEQ ID NO: 3008 - DNA, 13 bp, Artificial Sequence
  synthetic sequence
gagtttgacagta

SEQ ID NO: 3009 - DNA, 13 bp, Artificial Sequence
  synthetic sequence
attaccagttcac

SEQ ID NO: 3010 - DNA, 13 bp, Artificial Sequence
  synthetic sequence
cagaaagattgta

SEQ ID NO: 3011 - DNA, 13 bp, Artificial Sequence
  synthetic sequence
cagaacaatttct

SEQ ID NO: 3012 - DNA, 13 bp, Artificial Sequence
  synthetic sequence
ctcacgtcatctg

SEQ ID NO: 3013 - DNA, 13 bp, Artificial Sequence
  synthetic sequence
aatgagctggagc

SEQ ID NO: 3014 - DNA, 13 bp, Artificial Sequence
  synthetic sequence
tttgggaggccgg

SEQ ID NO: 3015 - DNA, 13 bp, Artificial Sequence
  synthetic sequence
ataaccacgatgt

SEQ ID NO: 3016 - DNA, 13 bp, Artificial Sequence
  synthetic sequence
tttgtgatttcct

SEQ ID NO: 3017 - DNA, 13 bp, Artificial Sequence
  synthetic sequence
agccagcgaaagg

SEQ ID NO: 3018 - DNA, 13 bp, Artificial Sequence
  synthetic sequence
agtatgaccagac

SEQ ID NO: 3019 - DNA, 13 bp, Artificial Sequence
  synthetic sequence
tgccgggcttgac

SEQ ID NO: 3020 - DNA, 13 bp, Artificial Sequence
  synthetic sequence
caccgcccgtcag

SEQ ID NO: 3021 - DNA, 13 bp, Artificial Sequence
  synthetic sequence
gctgctttatgcg

SEQ ID NO: 3022 - DNA, 13 bp, Artificial Sequence
  synthetic sequence
gagtttgatagta

SEQ ID NO: 3023 - DNA, 13 bp, Artificial Sequence
  synthetic sequence
ctataactgagga

SEQ ID NO: 3024 - DNA, 13 bp, Artificial Sequence
  synthetic sequence
acagtccacgagg

SEQ ID NO: 3025 - DNA, 13 bp, Artificial Sequence
  synthetic sequence
agcagctccgcct

SEQ ID NO: 3026 - DNA, 13 bp, Artificial Sequence
  synthetic sequence
accagtttaccgc

SEQ ID NO: 3027 - DNA, 13 bp, Artificial Sequence
  synthetic sequence
aaaggtgatgatt

SEQ ID NO: 3028 - DNA, 13 bp, Artificial Sequence
  synthetic sequence
catatttgggacc

SEQ ID NO: 3029 - DNA, 13 bp, Artificial Sequence
  synthetic sequence
gggctgttctgtt

SEQ ID NO: 3030 - DNA, 13 bp, Artificial Sequence
  synthetic sequence
gccctcggcctat

SEQ ID NO: 3031 - DNA, 13 bp, Artificial Sequence
  synthetic sequence
gccagcgcaaggc

SEQ ID NO: 3032 - DNA, 13 bp, Artificial Sequence
  synthetic sequence
tgggaagctggca

SEQ ID NO: 3033 - DNA, 13 bp, Artificial Sequence
  synthetic sequence
ttgccgcccgagc

SEQ ID NO: 3034 - DNA, 13 bp, Artificial Sequence
  synthetic sequence
ccggactcgactg

SEQ ID NO: 3035 - DNA, 13 bp, Artificial Sequence
  synthetic sequence
ggcgaccccaacc

SEQ ID NO: 3036 - DNA, 13 bp, Artificial Sequence
  synthetic sequence
gggagacgtgctc

SEQ ID NO: 3037 - DNA, 13 bp, Artificial Sequence
  synthetic sequence
accgccacagtaa

SEQ ID NO: 3038 - DNA, 13 bp, Artificial Sequence
  synthetic sequence
acattcttccaga

SEQ ID NO: 3039 - DNA, 13 bp, Artificial Sequence
  synthetic sequence
ttgagcatgccca

SEQ ID NO: 3040 - DNA, 13 bp, Artificial Sequence
  synthetic sequence
cttggcgacccga

SEQ ID NO: 3041 - DNA, 13 bp, Artificial Sequence
  synthetic sequence
atcatgatgtgtc

SEQ ID NO: 3042 - DNA, 13 bp, Artificial Sequence
  synthetic sequence
tattgttttgacg

SEQ ID NO: 3043 - DNA, 13 bp, Artificial Sequence
  synthetic sequence
actgttgagctcg

SEQ ID NO: 3044 - DNA, 13 bp, Artificial Sequence
  synthetic sequence
ccatcagtcatac

SEQ ID NO: 3045 - DNA, 13 bp, Artificial Sequence
  synthetic sequence
ccataacccacca

SEQ ID NO: 3046 - DNA, 13 bp, Artificial Sequence
  synthetic sequence
ccggctcgctgtt

SEQ ID NO: 3047 - DNA, 13 bp, Artificial Sequence
  synthetic sequence
tttaaaggggatg

SEQ ID NO: 3048 - DNA, 13 bp, Artificial Sequence
  synthetic sequence
tctggaatcatcc

SEQ ID NO: 3049 - DNA, 13 bp, Artificial Sequence
  synthetic sequence
gtccatgaggccc

SEQ ID NO: 3050 - DNA, 13 bp, Artificial Sequence
  synthetic sequence
ctgagtacgatca

SEQ ID NO: 3051 - DNA, 13 bp, Artificial Sequence
  synthetic sequence
gtccatgaagccc

SEQ ID NO: 3052 - DNA, 13 bp, Artificial Sequence
  synthetic sequence
cagaaagactgta

SEQ ID NO: 3053 - DNA, 13 bp, Artificial Sequence
  synthetic sequence
gcaacccccgatg

SEQ ID NO: 3054 - DNA, 13 bp, Artificial Sequence
  synthetic sequence
gttttatgcggtg

SEQ ID NO: 3055 - DNA, 13 bp, Artificial Sequence
  synthetic sequence
catctgttgcttc

SEQ ID NO: 3056 - DNA, 13 bp, Artificial Sequence
  synthetic sequence
tgtttgagtcgga

SEQ ID NO: 3057 - DNA, 13 bp, Artificial Sequence
  synthetic sequence
accgttgagcttg

SEQ ID NO: 3058 - DNA, 13 bp, Artificial Sequence
  synthetic sequence
cgtatggctgccc

SEQ ID NO: 3059 - DNA, 13 bp, Artificial Sequence
  synthetic sequence
tctttctgggagg

SEQ ID NO: 3060 - DNA, 13 bp, Artificial Sequence
  synthetic sequence
gacccaaatcaga

SEQ ID NO: 3061 - DNA, 13 bp, Artificial Sequence
  synthetic sequence
gtccctgtgcata

SEQ ID NO: 3062 - DNA, 13 bp, Artificial Sequence
  synthetic sequence
tctaaaggcatgc

SEQ ID NO: 3063 - DNA, 13 bp, Artificial Sequence
  synthetic sequence
acatctactattg

SEQ ID NO: 3064 - DNA, 13 bp, Artificial Sequence
  synthetic sequence
ttggtcgcatccg

SEQ ID NO: 3065 - DNA, 13 bp, Artificial Sequence
  synthetic sequence
gagcctggcgtcg

SEQ ID NO: 3066 - DNA, 13 bp, Artificial Sequence
  synthetic sequence
tgtctcagccaca

SEQ ID NO: 3067 - DNA, 13 bp, Artificial Sequence
  synthetic sequence
cccgtacagccaa

SEQ ID NO: 3068 - DNA, 13 bp, Artificial Sequence
  synthetic sequence
ttgccgccgagac

SEQ ID NO: 3069 - DNA, 13 bp, Artificial Sequence
  synthetic sequence
tattgctttgatg

SEQ ID NO: 3070 - DNA, 13 bp, Artificial Sequence
  synthetic sequence
ttcatgaggccca

SEQ ID NO: 3071 - DNA, 13 bp, Artificial Sequence
  synthetic sequence
cttgagcttgagt

SEQ ID NO: 3072 - DNA, 13 bp, Artificial Sequence
  synthetic sequence
tacaaccatgatg

SEQ ID NO: 3073 - DNA, 13 bp, Artificial Sequence
  synthetic sequence
agtcagcgtaagg

SEQ ID NO: 3074 - DNA, 13 bp, Artificial Sequence
  synthetic sequence
gcgcccatctgtt

SEQ ID NO: 3075 - DNA, 13 bp, Artificial Sequence
  synthetic sequence
accagatccctgc

SEQ ID NO: 3076 - DNA, 13 bp, Artificial Sequence
  synthetic sequence
gctgaatatgacc

SEQ ID NO: 3077 - DNA, 13 bp, Artificial Sequence
  synthetic sequence
gctaccgttgaag

SEQ ID NO: 3078 - DNA, 13 bp, Artificial Sequence
  synthetic sequence
tcactgccggggt

SEQ ID NO: 3079 - DNA, 13 bp, Artificial Sequence
  synthetic sequence
agctcgagtttcg

SEQ ID NO: 3080 - DNA, 13 bp, Artificial Sequence
  synthetic sequence
attgttttgatgg

SEQ ID NO: 3081 - DNA, 13 bp, Artificial Sequence
  synthetic sequence
acccaggctatat

SEQ ID NO: 3082 - DNA, 13 bp, Artificial Sequence
  synthetic sequence
tctttcagaagga

SEQ ID NO: 3083 - DNA, 13 bp, Artificial Sequence
  synthetic sequence
taacggctactgt

SEQ ID NO: 3084 - DNA, 13 bp, Artificial Sequence
  synthetic sequence
gccgggcttgatt

SEQ ID NO: 3085 - DNA, 13 bp, Artificial Sequence
  synthetic sequence
tgttcgagtcaga

SEQ ID NO: 3086 - DNA, 13 bp, Artificial Sequence
  synthetic sequence
tggttcagcagtt

SEQ ID NO: 3087 - DNA, 13 bp, Artificial Sequence
  synthetic sequence
tgtttgaatcaga

SEQ ID NO: 3088 - DNA, 13 bp, Artificial Sequence
  synthetic sequence
gacatgaattcta

SEQ ID NO: 3089 - DNA, 13 bp, Artificial Sequence
  synthetic sequence
gagtccgagtgta

SEQ ID NO: 3090 - DNA, 13 bp, Artificial Sequence
  synthetic sequence
tttggaatcaccc

SEQ ID NO: 3091 - DNA, 13 bp, Artificial Sequence
  synthetic sequence
agtttgacagcac

SEQ ID NO: 3092 - DNA, 13 bp, Artificial Sequence
  synthetic sequence
accaacacccgtg

SEQ ID NO: 3093 - DNA, 13 bp, Artificial Sequence
  synthetic sequence
gctatgagttccg

SEQ ID NO: 3094 - DNA, 13 bp, Artificial Sequence
  synthetic sequence
gccaccatcgccc

SEQ ID NO: 3095 - DNA, 13 bp, Artificial Sequence
  synthetic sequence
tgtttgagtctga

SEQ ID NO: 3096 - DNA, 13 bp, Artificial Sequence
  synthetic sequence
atgaattccgtga

SEQ ID NO: 3097 - DNA, 13 bp, Artificial Sequence
  synthetic sequence
acctccactgatg

SEQ ID NO: 3098 - DNA, 13 bp, Artificial Sequence
  synthetic sequence
atggaggcccatc

SEQ ID NO: 3099 - DNA, 13 bp, Artificial Sequence
  synthetic sequence
gtatggccgcccc

SEQ ID NO: 3100 - DNA, 13 bp, Artificial Sequence
  synthetic sequence
aaccctgatcaga

SEQ ID NO: 3101 - DNA, 13 bp, Artificial Sequence
  synthetic sequence
ccttctgggaggc

SEQ ID NO: 3102 - DNA, 13 bp, Artificial Sequence
  synthetic sequence
tggagcttgaaca

SEQ ID NO: 3103 - DNA, 13 bp, Artificial Sequence
  synthetic sequence
caccccctgtgcc

SEQ ID NO: 3104 - DNA, 13 bp, Artificial Sequence
  synthetic sequence
ggtgcccctagcg

SEQ ID NO: 3105 - DNA, 13 bp, Artificial Sequence
  synthetic sequence
actattactgagg

SEQ ID NO: 3106 - DNA, 13 bp, Artificial Sequence
  synthetic sequence
taccagtttactg

SEQ ID NO: 3107 - DNA, 13 bp, Artificial Sequence
  synthetic sequence
tcccgctgcgcct

SEQ ID NO: 3108 - DNA, 13 bp, Artificial Sequence
  synthetic sequence
gatgtggtgtggg

SEQ ID NO: 3109 - DNA, 13 bp, Artificial Sequence
  synthetic sequence
tgcccccactcgg

SEQ ID NO: 3110 - DNA, 13 bp, Artificial Sequence
  synthetic sequence
ttgagttccgcaa

SEQ ID NO: 3111 - DNA, 13 bp, Artificial Sequence
  synthetic sequence
aagcggcttgagg

SEQ ID NO: 3112 - DNA, 13 bp, Artificial Sequence
  synthetic sequence
tgacggctactgt

SEQ ID NO: 3113 - DNA, 13 bp, Artificial Sequence
  synthetic sequence
actatcagtttac

SEQ ID NO: 3114 - DNA, 13 bp, Artificial Sequence
  synthetic sequence
atatctgggatcg

SEQ ID NO: 3115 - DNA, 13 bp, Artificial Sequence
  synthetic sequence
tatgctggctccc

SEQ ID NO: 3116 - DNA, 13 bp, Artificial Sequence
  synthetic sequence
actggcactaatc

SEQ ID NO: 3117 - DNA, 13 bp, Artificial Sequence
  synthetic sequence
gtccctcagtcct

SEQ ID NO: 3118 - DNA, 13 bp, Artificial Sequence
  synthetic sequence
cagtgacggtcca

SEQ ID NO: 3119 - DNA, 13 bp, Artificial Sequence
  synthetic sequence
caccttcttggtg

SEQ ID NO: 3120 - DNA, 13 bp, Artificial Sequence
  synthetic sequence
accctggcgcgat

SEQ ID NO: 3121 - DNA, 13 bp, Artificial Sequence
  synthetic sequence
gccaccatgcgcc

SEQ ID NO: 3122 - DNA, 13 bp, Artificial Sequence
  synthetic sequence
gagtatcgcaacc

SEQ ID NO: 3123 - DNA, 13 bp, Artificial Sequence
  synthetic sequence
agtatgaccaaac

SEQ ID NO: 3124 - DNA, 13 bp, Artificial Sequence
  synthetic sequence
ctgtttgtgactt

SEQ ID NO: 3125 - DNA, 13 bp, Artificial Sequence
  synthetic sequence
cctcaggcactaa

SEQ ID NO: 3126 - DNA, 13 bp, Artificial Sequence
  synthetic sequence
ttcatgaagtggc

SEQ ID NO: 3127 - DNA, 13 bp, Artificial Sequence
  synthetic sequence
gctatgaatttcg

SEQ ID NO: 3128 - DNA, 13 bp, Artificial Sequence
  synthetic sequence
gcacggctaacct

SEQ ID NO: 3129 - DNA, 13 bp, Artificial Sequence
  synthetic sequence
tctggaatcaccc

SEQ ID NO: 3130 - DNA, 13 bp, Artificial Sequence
  synthetic sequence
ttgttctcttgct

SEQ ID NO: 3131 - DNA, 13 bp, Artificial Sequence
  synthetic sequence
ggaaccaccctat

SEQ ID NO: 3132 - DNA, 13 bp, Artificial Sequence
  synthetic sequence
aatggcctagact

SEQ ID NO: 3133 - DNA, 13 bp, Artificial Sequence
  synthetic sequence
agttcaccgccgg

SEQ ID NO: 3134 - DNA, 13 bp, Artificial Sequence
  synthetic sequence
gtacggcgaacct

SEQ ID NO: 3135 - DNA, 13 bp, Artificial Sequence
  synthetic sequence
gggaagctggtac

SEQ ID NO: 3136 - DNA, 13 bp, Artificial Sequence
  synthetic sequence
gctgaatatgatc

SEQ ID NO: 3137 - DNA, 13 bp, Artificial Sequence
  synthetic sequence
actactaaagccg

SEQ ID NO: 3138 - DNA, 13 bp, Artificial Sequence
  synthetic sequence
acaaccacgatgt

SEQ ID NO: 3139 - DNA, 13 bp, Artificial Sequence
  synthetic sequence
agacttgctcccg

SEQ ID NO: 3140 - DNA, 13 bp, Artificial Sequence
  synthetic sequence
aaccaaatccctg

SEQ ID NO: 3141 - DNA, 13 bp, Artificial Sequence
  synthetic sequence
catatttgggata

SEQ ID NO: 3142 - DNA, 13 bp, Artificial Sequence
  synthetic sequence
gctacaatcatga

SEQ ID NO: 3143 - DNA, 13 bp, Artificial Sequence
  synthetic sequence
tgacggccactgt

SEQ ID NO: 3144 - DNA, 13 bp, Artificial Sequence
  synthetic sequence
tctgctgttttat

SEQ ID NO: 3145 - DNA, 13 bp, Artificial Sequence
  synthetic sequence
tttggaaccatcc

SEQ ID NO: 3146 - DNA, 13 bp, Artificial Sequence
  synthetic sequence
gcatgaccccatg

SEQ ID NO: 3147 - DNA, 13 bp, Artificial Sequence
  synthetic sequence
gttcacgaggccc

SEQ ID NO: 3148 - DNA, 13 bp, Artificial Sequence
  synthetic sequence
acatctgggaccg

SEQ ID NO: 3149 - DNA, 13 bp, Artificial Sequence
  synthetic sequence
gggaacaccaata

SEQ ID NO: 3150 - DNA, 13 bp, Artificial Sequence
  synthetic sequence
gcaggttacaatc

SEQ ID NO: 3151 - DNA, 13 bp, Artificial Sequence
  synthetic sequence
ccactgtcgagct

SEQ ID NO: 3152 - DNA, 13 bp, Artificial Sequence
  synthetic sequence
gctatatctaagg

SEQ ID NO: 3153 - DNA, 13 bp, Artificial Sequence
  synthetic sequence
aggaccttgagca

SEQ ID NO: 3154 - DNA, 13 bp, Artificial Sequence
  synthetic sequence
cgtatggcggcgc

SEQ ID NO: 3155 - DNA, 13 bp, Artificial Sequence
  synthetic sequence
actataaccgagg

SEQ ID NO: 3156 - DNA, 13 bp, Artificial Sequence
  synthetic sequence
gccatcaccgccc

SEQ ID NO: 3157 - DNA, 13 bp, Artificial Sequence
  synthetic sequence
agacctgttcccg

SEQ ID NO: 3158 - DNA, 13 bp, Artificial Sequence
  synthetic sequence
cagggcatttcta

SEQ ID NO: 3159 - DNA, 13 bp, Artificial Sequence
  synthetic sequence
tccttgcgaagat

SEQ ID NO: 3160 - DNA, 13 bp, Artificial Sequence
  synthetic sequence
ctaaaggtatgcg

SEQ ID NO: 3161 - DNA, 13 bp, Artificial Sequence
  synthetic sequence
catcgtaaagagt

SEQ ID NO: 3162 - DNA, 13 bp, Artificial Sequence
  synthetic sequence
aagtgtatgccgg

SEQ ID NO: 3163 - DNA, 13 bp, Artificial Sequence
  synthetic sequence
cttctggcaccaa

SEQ ID NO: 3164 - DNA, 13 bp, Artificial Sequence
  synthetic sequence
gcctctggaacta

SEQ ID NO: 3165 - DNA, 13 bp, Artificial Sequence
  synthetic sequence
tcgtgctcgtgct

SEQ ID NO: 3166 - DNA, 13 bp, Artificial Sequence
  synthetic sequence
gttataccgcgtg

SEQ ID NO: 3167 - DNA, 13 bp, Artificial Sequence
  synthetic sequence
gctgtctgtgact

SEQ ID NO: 3168 - DNA, 13 bp, Artificial Sequence
  synthetic sequence
tacagctagacac

SEQ ID NO: 3169 - DNA, 13 bp, Artificial Sequence
  synthetic sequence
ggctgaggaggcc

SEQ ID NO: 3170 - DNA, 13 bp, Artificial Sequence
  synthetic sequence
ttgctgctcgtgc

SEQ ID NO: 3171 - DNA, 13 bp, Artificial Sequence
  synthetic sequence
ggagggcagatgt

SEQ ID NO: 3172 - DNA, 13 bp, Artificial Sequence
  synthetic sequence
gttgacatgaact

SEQ ID NO: 3173 - DNA, 13 bp, Artificial Sequence
  synthetic sequence
gctaatcctggtg

SEQ ID NO: 3174 - DNA, 13 bp, Artificial Sequence
  synthetic sequence
ttttccagaagga

SEQ ID NO: 3175 - DNA, 13 bp, Artificial Sequence
  synthetic sequence
gctacgagttccg

SEQ ID NO: 3176 - DNA, 13 bp, Artificial Sequence
  synthetic sequence
gaatttgatagca

SEQ ID NO: 3177 - DNA, 13 bp, Artificial Sequence
  synthetic sequence
gtttcaccccggt

SEQ ID NO: 3178 - DNA, 13 bp, Artificial Sequence
  synthetic sequence
gttcatgaagccc

SEQ ID NO: 3179 - DNA, 13 bp, Artificial Sequence
  synthetic sequence
gtgaccccaacca

SEQ ID NO: 3180 - DNA, 13 bp, Artificial Sequence
  synthetic sequence
tggactgtaccgc

SEQ ID NO: 3181 - DNA, 13 bp, Artificial Sequence
  synthetic sequence
ataccccgcggca

SEQ ID NO: 3182 - DNA, 13 bp, Artificial Sequence
  synthetic sequence
cttgcaagtcccg

SEQ ID NO: 3183 - DNA, 13 bp, Artificial Sequence
  synthetic sequence
ttgctgcccgagc

SEQ ID NO: 3184 - DNA, 13 bp, Artificial Sequence
  synthetic sequence
gcaacattccccc

SEQ ID NO: 3185 - DNA, 13 bp, Artificial Sequence
  synthetic sequence
ccgaacagttgcg

SEQ ID NO: 3186 - DNA, 13 bp, Artificial Sequence
  synthetic sequence
gccagcggaaagc

SEQ ID NO: 3187 - DNA, 13 bp, Artificial Sequence
  synthetic sequence
acccgaaccagat

SEQ ID NO: 3188 - DNA, 13 bp, Artificial Sequence
  synthetic sequence
gtgtccctggctc

SEQ ID NO: 3189 - DNA, 13 bp, Artificial Sequence
  synthetic sequence
tttcatgcggtgg

SEQ ID NO: 3190 - DNA, 13 bp, Artificial Sequence
  synthetic sequence
tccccgctcacgt

SEQ ID NO: 3191 - DNA, 13 bp, Artificial Sequence
  synthetic sequence
ttatgaaatggct

SEQ ID NO: 3192 - DNA, 13 bp, Artificial Sequence
  synthetic sequence
gaggtttctgatg

SEQ ID NO: 3193 - DNA, 13 bp, Artificial Sequence
  synthetic sequence
gatgtgctttggc

SEQ ID NO: 3194 - DNA, 13 bp, Artificial Sequence
  synthetic sequence
cataagccaccgg

SEQ ID NO: 3195 - DNA, 13 bp, Artificial Sequence
  synthetic sequence
ggtggcgccccta

SEQ ID NO: 3196 - DNA, 13 bp, Artificial Sequence
  synthetic sequence
aggggatgaaaag

SEQ ID NO: 3197 - DNA, 13 bp, Artificial Sequence
  synthetic sequence
ccaccagcaccag

SEQ ID NO: 3198 - DNA, 13 bp, Artificial Sequence
  synthetic sequence
ccgttgatatgaa

SEQ ID NO: 3199 - DNA, 13 bp, Artificial Sequence
  synthetic sequence
gctactgtcgagc

SEQ ID NO: 3200 - DNA, 13 bp, Artificial Sequence
  synthetic sequence
gctatgagtttcg

SEQ ID NO: 3201 - DNA, 13 bp, Artificial Sequence
  synthetic sequence
tgtccacgtctcc

SEQ ID NO: 3202 - DNA, 13 bp, Artificial Sequence
  synthetic sequence
gggcctgtgaggt

SEQ ID NO: 3203 - DNA, 13 bp, Artificial Sequence
  synthetic sequence
accattactgagg

SEQ ID NO: 3204 - DNA, 13 bp, Artificial Sequence
  synthetic sequence
ttgcggcccgtgc

SEQ ID NO: 3205 - DNA, 13 bp, Artificial Sequence
  synthetic sequence
tggaaccacccga

SEQ ID NO: 3206 - DNA, 13 bp, Artificial Sequence
  synthetic sequence
ctgtgcgtaagcc

SEQ ID NO: 3207 - DNA, 13 bp, Artificial Sequence
  synthetic sequence
ccaccgttgaggt

SEQ ID NO: 3208 - DNA, 13 bp, Artificial Sequence
  synthetic sequence
gacggcgctaagg

SEQ ID NO: 3209 - DNA, 13 bp, Artificial Sequence
  synthetic sequence
accaacactcgtg

SEQ ID NO: 3210 - DNA, 13 bp, Artificial Sequence
  synthetic sequence
ctaaagggatgaa

SEQ ID NO: 3211 - DNA, 13 bp, Artificial Sequence
  synthetic sequence
actgcaaggctgt

SEQ ID NO: 3212 - DNA, 13 bp, Artificial Sequence
  synthetic sequence
tccagaaagactg

SEQ ID NO: 3213 - DNA, 13 bp, Artificial Sequence
  synthetic sequence
agtccgagtgcac

SEQ ID NO: 3214 - DNA, 13 bp, Artificial Sequence
  synthetic sequence
ccaaccaatccct

SEQ ID NO: 3215 - DNA, 13 bp, Artificial Sequence
  synthetic sequence
cagcgcaaagcgg

SEQ ID NO: 3216 - DNA, 13 bp, Artificial Sequence
  synthetic sequence
actgctttgatgg

SEQ ID NO: 3217 - DNA, 13 bp, Artificial Sequence
  synthetic sequence
ggcagtcttcccc

SEQ ID NO: 3218 - DNA, 13 bp, Artificial Sequence
  synthetic sequence
cccgtacggccaa

SEQ ID NO: 3219 - DNA, 13 bp, Artificial Sequence
  synthetic sequence
ctcgagcttgagt

SEQ ID NO: 3220 - DNA, 13 bp, Artificial Sequence
  synthetic sequence
tgctttgacgggt

SEQ ID NO: 3221 - DNA, 13 bp, Artificial Sequence
  synthetic sequence
gttcataagccac

SEQ ID NO: 3222 - DNA, 13 bp, Artificial Sequence
  synthetic sequence
catgcgccctagg

SEQ ID NO: 3223 - DNA, 13 bp, Artificial Sequence
  synthetic sequence
cttcgtggtaagc

SEQ ID NO: 3224 - DNA, 13 bp, Artificial Sequence
  synthetic sequence
ttgtgtgggtgac

SEQ ID NO: 3225 - DNA, 13 bp, Artificial Sequence
  synthetic sequence
cttccgtggccac

SEQ ID NO: 3226 - DNA, 13 bp, Artificial Sequence
  synthetic sequence
cgcatggctgctc

SEQ ID NO: 3227 - DNA, 13 bp, Artificial Sequence
  synthetic sequence
tggaaccacccca

SEQ ID NO: 3228 - DNA, 13 bp, Artificial Sequence
  synthetic sequence
agcttgaatttag

SEQ ID NO: 3229 - DNA, 13 bp, Artificial Sequence
  synthetic sequence
gtgagaaggcccg

SEQ ID NO: 3230 - DNA, 13 bp, Artificial Sequence
  synthetic sequence
gatgatttctgcc

SEQ ID NO: 3231 - DNA, 13 bp, Artificial Sequence
  synthetic sequence
ccgtcggtcatac

SEQ ID NO: 3232 - DNA, 13 bp, Artificial Sequence
  synthetic sequence
gcttagattgtac

SEQ ID NO: 3233 - DNA, 13 bp, Artificial Sequence
  synthetic sequence
ttcgagtcggatt

SEQ ID NO: 3234 - DNA, 13 bp, Artificial Sequence
  synthetic sequence
aatcaaattcctg

SEQ ID NO: 3235 - DNA, 13 bp, Artificial Sequence
  synthetic sequence
aatcagatccctg

SEQ ID NO: 3236 - DNA, 13 bp, Artificial Sequence
  synthetic sequence
gtgttcccgggtc

SEQ ID NO: 3237 - DNA, 13 bp, Artificial Sequence
  synthetic sequence
tgcagcccgtaac

SEQ ID NO: 3238 - DNA, 13 bp, Artificial Sequence
  synthetic sequence
attatgccgaggt

SEQ ID NO: 3239 - DNA, 13 bp, Artificial Sequence
  synthetic sequence
cgtaccgtgagac

SEQ ID NO: 3240 - DNA, 13 bp, Artificial Sequence
  synthetic sequence
cactaccagttca

SEQ ID NO: 3241 - DNA, 13 bp, Artificial Sequence
  synthetic sequence
atagtccttgaca

SEQ ID NO: 3242 - DNA, 13 bp, Artificial Sequence
  synthetic sequence
agacatgctcccg

SEQ ID NO: 3243 - DNA, 13 bp, Artificial Sequence
  synthetic sequence
agctcgagttccg

SEQ ID NO: 3244 - DNA, 13 bp, Artificial Sequence
  synthetic sequence
aatttgacagtac

SEQ ID NO: 3245 - DNA, 13 bp, Artificial Sequence
  synthetic sequence
attagcttttggg

SEQ ID NO: 3246 - DNA, 13 bp, Artificial Sequence
  synthetic sequence
ctgtttagccaga

SEQ ID NO: 3247 - DNA, 13 bp, Artificial Sequence
  synthetic sequence
ggggtgtcaaggg

SEQ ID NO: 3248 - DNA, 13 bp, Artificial Sequence
  synthetic sequence
ccgtagaaaaggc

SEQ ID NO: 3249 - DNA, 13 bp, Artificial Sequence
  synthetic sequence
tctgagttcgata

SEQ ID NO: 3250 - DNA, 13 bp, Artificial Sequence
  synthetic sequence
tgggcatcaagcg

SEQ ID NO: 3251 - DNA, 13 bp, Artificial Sequence
  synthetic sequence
tgcgcgactttgt

SEQ ID NO: 3252 - DNA, 13 bp, Artificial Sequence
  synthetic sequence
tgttgctttatgc

SEQ ID NO: 3253 - DNA, 13 bp, Artificial Sequence
  synthetic sequence
gaggtcgagcatg

SEQ ID NO: 3254 - DNA, 13 bp, Artificial Sequence
  synthetic sequence
atggggatcaagc

SEQ ID NO: 3255 - DNA, 13 bp, Artificial Sequence
  synthetic sequence
ggcgcaccctgtg

SEQ ID NO: 3256 - DNA, 13 bp, Artificial Sequence
  synthetic sequence
agtaagccagcta

SEQ ID NO: 3257 - DNA, 13 bp, Artificial Sequence
  synthetic sequence
gcccgtctgttat

SEQ ID NO: 3258 - DNA, 13 bp, Artificial Sequence
  synthetic sequence
gtcaacgtaaggc

SEQ ID NO: 3259 - DNA, 13 bp, Artificial Sequence
  synthetic sequence
tgtccacatcccc

SEQ ID NO: 3260 - DNA, 13 bp, Artificial Sequence
  synthetic sequence
aaccagattcctg

SEQ ID NO: 3261 - DNA, 13 bp, Artificial Sequence
  synthetic sequence
atgtgcacaagcg

SEQ ID NO: 3262 - DNA, 13 bp, Artificial Sequence
  synthetic sequence
cttgactgtaagg

SEQ ID NO: 3263 - DNA, 13 bp, Artificial Sequence
  synthetic sequence
ccgcaagggctgc

SEQ ID NO: 3264 - DNA, 13 bp, Artificial Sequence
  synthetic sequence
cccgctattgatt

SEQ ID NO: 3265 - DNA, 13 bp, Artificial Sequence
  synthetic sequence
ttttactcccgcc

SEQ ID NO: 3266 - DNA, 13 bp, Artificial Sequence
  synthetic sequence
gtccatgaagctc

SEQ ID NO: 3267 - DNA, 13 bp, Artificial Sequence
  synthetic sequence
accctgtgcccag

SEQ ID NO: 3268 - DNA, 13 bp, Artificial Sequence
  synthetic sequence
caggtggccaagc

SEQ ID NO: 3269 - DNA, 13 bp, Artificial Sequence
  synthetic sequence
atccgatccagcg

SEQ ID NO: 3270 - DNA, 13 bp, Artificial Sequence
  synthetic sequence
atgcagtatgtga

SEQ ID NO: 3271 - DNA, 13 bp, Artificial Sequence
  synthetic sequence
ccgttctttcaac

SEQ ID NO: 3272 - DNA, 13 bp, Artificial Sequence
  synthetic sequence
gtgcagcctgtaa

SEQ ID NO: 3273 - DNA, 13 bp, Artificial Sequence
  synthetic sequence
ggaagcgcatcag

SEQ ID NO: 3274 - DNA, 13 bp, Artificial Sequence
  synthetic sequence
cagcatcgcccgt

SEQ ID NO: 3275 - DNA, 13 bp, Artificial Sequence
  synthetic sequence
tcaccccagaaac

SEQ ID NO: 3276 - DNA, 13 bp, Artificial Sequence
  synthetic sequence
acatgttattcat

SEQ ID NO: 3277 - DNA, 13 bp, Artificial Sequence
  synthetic sequence
actcccgggtttt

SEQ ID NO: 3278 - DNA, 13 bp, Artificial Sequence
  synthetic sequence
ttagaatactgct

SEQ ID NO: 3279 - DNA, 13 bp, Artificial Sequence
  synthetic sequence
gccatgttccaga

SEQ ID NO: 3280 - DNA, 13 bp, Artificial Sequence
  synthetic sequence
cccgctgcatgtg

SEQ ID NO: 3281 - DNA, 13 bp, Artificial Sequence
  synthetic sequence
tcagcaagattaa

SEQ ID NO: 3282 - DNA, 13 bp, Artificial Sequence
  synthetic sequence
gaatcaacatcag

SEQ ID NO: 3283 - DNA, 13 bp, Artificial Sequence
  synthetic sequence
gggccccaattct

SEQ ID NO: 3284 - DNA, 13 bp, Artificial Sequence
  synthetic sequence
ttctgctcaaccc

SEQ ID NO: 3285 - DNA, 13 bp, Artificial Sequence
  synthetic sequence
gggccccagttct

SEQ ID NO: 3286 - DNA, 13 bp, Artificial Sequence
  synthetic sequence
taaagtgtgctct

SEQ ID NO: 3287 - DNA, 13 bp, Artificial Sequence
  synthetic sequence
ggaggtagcgctg

SEQ ID NO: 3288 - DNA, 13 bp, Artificial Sequence
  synthetic sequence
aggaaaaagttat

SEQ ID NO: 3289 - DNA, 13 bp, Artificial Sequence
  synthetic sequence
taaggtgtattag

SEQ ID NO: 3290 - DNA, 13 bp, Artificial Sequence
  synthetic sequence
agaaggggttggc

SEQ ID NO: 3291 - DNA, 13 bp, Artificial Sequence
  synthetic sequence
cattctcaaaaac

SEQ ID NO: 3292 - DNA, 13 bp, Artificial Sequence
  synthetic sequence
catcaaaaacaag

SEQ ID NO: 3293 - DNA, 13 bp, Artificial Sequence
  synthetic sequence
gagtactgctgga

SEQ ID NO: 3294 - DNA, 13 bp, Artificial Sequence
  synthetic sequence
ctatgatcgccat

SEQ ID NO: 3295 - DNA, 13 bp, Artificial Sequence
  synthetic sequence
gtctggggccaaa

SEQ ID NO: 3296 - DNA, 13 bp, Artificial Sequence
  synthetic sequence
agaagcgtatcag

SEQ ID NO: 3297 - DNA, 13 bp, Artificial Sequence
  synthetic sequence
gcccgctgcatat

SEQ ID NO: 3298 - DNA, 13 bp, Artificial Sequence
  synthetic sequence
cactatcggacac

SEQ ID NO: 3299 - DNA, 13 bp, Artificial Sequence
  synthetic sequence
aaggggttagcag

SEQ ID NO: 3300 - DNA, 13 bp, Artificial Sequence
  synthetic sequence
ttagcctcaaacc

SEQ ID NO: 3301 - DNA, 13 bp, Artificial Sequence
  synthetic sequence
ccagggccaaata

SEQ ID NO: 3302 - DNA, 13 bp, Artificial Sequence
  synthetic sequence
gtcacaacagcac

SEQ ID NO: 3303 - DNA, 13 bp, Artificial Sequence
  synthetic sequence
agtcaacatcagg

SEQ ID NO: 3304 - DNA, 13 bp, Artificial Sequence
  synthetic sequence
acggcagagccgt

SEQ ID NO: 3305 - DNA, 13 bp, Artificial Sequence
  synthetic sequence
ccacaaaaaggat

SEQ ID NO: 3306 - DNA, 13 bp, Artificial Sequence
  synthetic sequence
gcagcatcgatct

SEQ ID NO: 3307 - DNA, 13 bp, Artificial Sequence
  synthetic sequence
catcacggctgca

SEQ ID NO: 3308 - DNA, 13 bp, Artificial Sequence
  synthetic sequence
ctcccgagtttta

SEQ ID NO: 3309 - DNA, 13 bp, Artificial Sequence
  synthetic sequence
cccagtttttctc

SEQ ID NO: 3310 - DNA, 13 bp, Artificial Sequence
  synthetic sequence
cattttcaaatac

SEQ ID NO: 3311 - DNA, 13 bp, Artificial Sequence
  synthetic sequence
acaccgaccgcag

SEQ ID NO: 3312 - DNA, 13 bp, Artificial Sequence
  synthetic sequence
acagcatggataa

SEQ ID NO: 3313 - DNA, 13 bp, Artificial Sequence
  synthetic sequence
gtgtcagcaaggt

SEQ ID NO: 3314 - DNA, 13 bp, Artificial Sequence
  synthetic sequence
cacactatcagac

SEQ ID NO: 3315 - DNA, 13 bp, Artificial Sequence
  synthetic sequence
catcaaaaacgag

SEQ ID NO: 3316 - DNA, 13 bp, Artificial Sequence
  synthetic sequence
ccccctcatatgt

SEQ ID NO: 3317 - DNA, 13 bp, Artificial Sequence
  synthetic sequence
ggctcattccaga

SEQ ID NO: 3318 - DNA, 13 bp, Artificial Sequence
  synthetic sequence
gggcctcaagctg

SEQ ID NO: 3319 - DNA, 13 bp, Artificial Sequence
  synthetic sequence
gccatattccaga

SEQ ID NO: 3320 - DNA, 13 bp, Artificial Sequence
  synthetic sequence
tggcctcaaacca

SEQ ID NO: 3321 - DNA, 13 bp, Artificial Sequence
  synthetic sequence
gcagtaatcacag

SEQ ID NO: 3322 - DNA, 13 bp, Artificial Sequence
  synthetic sequence
actatgtccgtga

SEQ ID NO: 3323 - DNA, 13 bp, Artificial Sequence
  synthetic sequence
atcctaacctgca

SEQ ID NO: 3324 - DNA, 13 bp, Artificial Sequence
  synthetic sequence
ggccagaaagaga

SEQ ID NO: 3325 - DNA, 13 bp, Artificial Sequence
  synthetic sequence
aggacaccgacag

SEQ ID NO: 3326 - DNA, 13 bp, Artificial Sequence
  synthetic sequence
cggcggcagttag

SEQ ID NO: 3327 - DNA, 13 bp, Artificial Sequence
  synthetic sequence
accggcggcagtt

SEQ ID NO: 3328 - DNA, 13 bp, Artificial Sequence
  synthetic sequence
agggtgtattagt

SEQ ID NO: 3329 - DNA, 13 bp, Artificial Sequence
  synthetic sequence
ccatgttccaaac

SEQ ID NO: 3330 - DNA, 13 bp, Artificial Sequence
  synthetic sequence
gccagaaagaaat

SEQ ID NO: 3331 - DNA, 13 bp, Artificial Sequence
  synthetic sequence
tagcttcaaacca

SEQ ID NO: 3332 - DNA, 13 bp, Artificial Sequence
  synthetic sequence
tagcctcgaacca

SEQ ID NO: 3333 - DNA, 13 bp, Artificial Sequence
  synthetic sequence
gcaccagtataag

SEQ ID NO: 3334 - DNA, 13 bp, Artificial Sequence
  synthetic sequence
tatactggcggcg

SEQ ID NO: 3335 - DNA, 13 bp, Artificial Sequence
  synthetic sequence
gtagctggctacc

SEQ ID NO: 3336 - DNA, 13 bp, Artificial Sequence
  synthetic sequence
aaagggcgagagg

SEQ ID NO: 3337 - DNA, 13 bp, Artificial Sequence
  synthetic sequence
cattctcaaacac

SEQ ID NO: 3338 - DNA, 13 bp, Artificial Sequence
  synthetic sequence
acggggagccgcc

SEQ ID NO: 3339 - DNA, 13 bp, Artificial Sequence
  synthetic sequence
ccccagttcttct

SEQ ID NO: 3340 - DNA, 13 bp, Artificial Sequence
  synthetic sequence
cagaagggattgg

SEQ ID NO: 3341 - DNA, 13 bp, Artificial Sequence
  synthetic sequence
ccgacctcagtgg

SEQ ID NO: 3342 - DNA, 13 bp, Artificial Sequence
  synthetic sequence
aagttgttgacaa

SEQ ID NO: 3343 - DNA, 13 bp, Artificial Sequence
  synthetic sequence
ggacggcggagcc

SEQ ID NO: 3344 - DNA, 13 bp, Artificial Sequence
  synthetic sequence
ggctcattccaaa

SEQ ID NO: 3345 - DNA, 13 bp, Artificial Sequence
  synthetic sequence
ccgtcgtgaatca

SEQ ID NO: 3346 - DNA, 13 bp, Artificial Sequence
  synthetic sequence
cgttctcaaagac

SEQ ID NO: 3347 - DNA, 13 bp, Artificial Sequence
  synthetic sequence
tgaacactagttt

SEQ ID NO: 3348 - DNA, 13 bp, Artificial Sequence
  synthetic sequence
ctcgctgcatatg

SEQ ID NO: 3349 - DNA, 13 bp, Artificial Sequence
  synthetic sequence
aaagggttagcag

SEQ ID NO: 3350 - DNA, 13 bp, Artificial Sequence
  synthetic sequence
ccaaaaatggacc

SEQ ID NO: 3351 - DNA, 13 bp, Artificial Sequence
  synthetic sequence
tcaagaagcccca

SEQ ID NO: 3352 - DNA, 13 bp, Artificial Sequence
  synthetic sequence
gcacctcaaggcc

SEQ ID NO: 3353 - DNA, 13 bp, Artificial Sequence
  synthetic sequence
gggtgagctcata

SEQ ID NO: 3354 - DNA, 13 bp, Artificial Sequence
  synthetic sequence
gaggccaaaaaga

SEQ ID NO: 3355 - DNA, 13 bp, Artificial Sequence
  synthetic sequence
cggcaattagcag

SEQ ID NO: 3356 - DNA, 13 bp, Artificial Sequence
  synthetic sequence
agaagggggcaca

SEQ ID NO: 3357 - DNA, 13 bp, Artificial Sequence
  synthetic sequence
aggtacctctgat

SEQ ID NO: 3358 - DNA, 13 bp, Artificial Sequence
  synthetic sequence
gggttatgttcca

SEQ ID NO: 3359 - DNA, 13 bp, Artificial Sequence
  synthetic sequence
gaaaaaggacgag

SEQ ID NO: 3360 - DNA, 13 bp, Artificial Sequence
  synthetic sequence
ggcactgactcat

SEQ ID NO: 3361 - DNA, 13 bp, Artificial Sequence
  synthetic sequence
gtatcaccctcat

SEQ ID NO: 3362 - DNA, 13 bp, Artificial Sequence
  synthetic sequence
ccaacttctggcc

SEQ ID NO: 3363 - DNA, 13 bp, Artificial Sequence
  synthetic sequence
aggcccggccgac

SEQ ID NO: 3364 - DNA, 13 bp, Artificial Sequence
  synthetic sequence
ccctctgcatatg

SEQ ID NO: 3365 - DNA, 13 bp, Artificial Sequence
  synthetic sequence
ccacaaaacgggt

SEQ ID NO: 3366 - DNA, 13 bp, Artificial Sequence
  synthetic sequence
ctatcacaggtgg

SEQ ID NO: 3367 - DNA, 13 bp, Artificial Sequence
  synthetic sequence
cagggggccgact

SEQ ID NO: 3368 - DNA, 13 bp, Artificial Sequence
  synthetic sequence
cctccagcccagc

SEQ ID NO: 3369 - DNA, 13 bp, Artificial Sequence
  synthetic sequence
gaagtgtatcagc

SEQ ID NO: 3370 - DNA, 13 bp, Artificial Sequence
  synthetic sequence
cctcgagctggcg

SEQ ID NO: 3371 - DNA, 13 bp, Artificial Sequence
  synthetic sequence
acatcacggctac

SEQ ID NO: 3372 - DNA, 13 bp, Artificial Sequence
  synthetic sequence
cacaaaatgggtt

SEQ ID NO: 3373 - DNA, 13 bp, Artificial Sequence
  synthetic sequence
catgaataatagg

SEQ ID NO: 3374 - DNA, 13 bp, Artificial Sequence
  synthetic sequence
tctcaccgcaaaa

SEQ ID NO: 3375 - DNA, 13 bp, Artificial Sequence
  synthetic sequence
gagtactgctgaa

SEQ ID NO: 3376 - DNA, 13 bp, Artificial Sequence
  synthetic sequence
cgctgatggcaaa

SEQ ID NO: 3377 - DNA, 13 bp, Artificial Sequence
  synthetic sequence
ggtgcgaggacac

SEQ ID NO: 3378 - DNA, 13 bp, Artificial Sequence
  synthetic sequence
tcatcaaagacaa

SEQ ID NO: 3379 - DNA, 13 bp, Artificial Sequence
  synthetic sequence
gtcggggtggtgg

SEQ ID NO: 3380 - DNA, 13 bp, Artificial Sequence
  synthetic sequence
aggcagatggaaa

SEQ ID NO: 3381 - DNA, 13 bp, Artificial Sequence
  synthetic sequence
cgctggtggcaaa

SEQ ID NO: 3382 - DNA, 13 bp, Artificial Sequence
  synthetic sequence
acaagttcatacg

SEQ ID NO: 3383 - DNA, 13 bp, Artificial Sequence
  synthetic sequence
taccacccgggcc

SEQ ID NO: 3384 - DNA, 13 bp, Artificial Sequence
  synthetic sequence
cctggtaaagagg

SEQ ID NO: 3385 - DNA, 13 bp, Artificial Sequence
  synthetic sequence
acacgacagccag

SEQ ID NO: 3386 - DNA, 13 bp, Artificial Sequence
  synthetic sequence
caaccgcagaaat

SEQ ID NO: 3387 - DNA, 13 bp, Artificial Sequence
  synthetic sequence
cataagtcacgac

SEQ ID NO: 3388 - DNA, 13 bp, Artificial Sequence
  synthetic sequence
ccccagaacaggg

SEQ ID NO: 3389 - DNA, 13 bp, Artificial Sequence
  synthetic sequence
ttggcctcgaacc

SEQ ID NO: 3390 - DNA, 13 bp, Artificial Sequence
  synthetic sequence
cggagcggcggca

SEQ ID NO: 3391 - DNA, 13 bp, Artificial Sequence
  synthetic sequence
gcagaacggcggc

SEQ ID NO: 3392 - DNA, 13 bp, Artificial Sequence
  synthetic sequence
cgacatcaggcac

SEQ ID NO: 3393 - DNA, 13 bp, Artificial Sequence
  synthetic sequence
tatactggcgacg

SEQ ID NO: 3394 - DNA, 13 bp, Artificial Sequence
  synthetic sequence
ttagcttcgaacc

SEQ ID NO: 3395 - DNA, 13 bp, Artificial Sequence
  synthetic sequence
gccatattccaaa

SEQ ID NO: 3396 - DNA, 13 bp, Artificial Sequence
  synthetic sequence
gacggggtaggcc

SEQ ID NO: 3397 - DNA, 13 bp, Artificial Sequence
  synthetic sequence
gtgtcaccctcat

SEQ ID NO: 3398 - DNA, 13 bp, Artificial Sequence
  synthetic sequence
cccaaaacaaaga

SEQ ID NO: 3399 - DNA, 13 bp, Artificial Sequence
  synthetic sequence
cattctcaaagac

SEQ ID NO: 3400 - DNA, 13 bp, Artificial Sequence
  synthetic sequence
tcaagcacagcta

SEQ ID NO: 3401 - DNA, 13 bp, Artificial Sequence
  synthetic sequence
gaaggggtgggac

SEQ ID NO: 3402 - DNA, 13 bp, Artificial Sequence
  synthetic sequence
gcacaagcacggc

SEQ ID NO: 3403 - DNA, 13 bp, Artificial Sequence
  synthetic sequence
ccctatagtcggg

SEQ ID NO: 3404 - DNA, 13 bp, Artificial Sequence
  synthetic sequence
cagggagcgcgga

SEQ ID NO: 3405 - DNA, 13 bp, Artificial Sequence
  synthetic sequence
ccagggccgaata

SEQ ID NO: 3406 - DNA, 13 bp, Artificial Sequence
  synthetic sequence
ttttcaaacacca

SEQ ID NO: 3407 - DNA, 13 bp, Artificial Sequence
  synthetic sequence
tccccctcgtatg

SEQ ID NO: 3408 - DNA, 13 bp, Artificial Sequence
  synthetic sequence
gtctgaggccaga

SEQ ID NO: 3409 - DNA, 13 bp, Artificial Sequence
  synthetic sequence
ccccagtataggg

SEQ ID NO: 3410 - DNA, 13 bp, Artificial Sequence
  synthetic sequence
cactgtccgatgt

SEQ ID NO: 3411 - DNA, 13 bp, Artificial Sequence
  synthetic sequence
cggcagttggcag

SEQ ID NO: 3412 - DNA, 13 bp, Artificial Sequence
  synthetic sequence
cgcgacggggctg

SEQ ID NO: 3413 - DNA, 13 bp, Artificial Sequence
  synthetic sequence
ggtggcagatggt

SEQ ID NO: 3414 - DNA, 13 bp, Artificial Sequence
  synthetic sequence
aatactgctggat

SEQ ID NO: 3415 - DNA, 13 bp, Artificial Sequence
  synthetic sequence
aatggattagccg

SEQ ID NO: 3416 - DNA, 13 bp, Artificial Sequence
  synthetic sequence
cccgcaggtgtca

SEQ ID NO: 3417 - DNA, 13 bp, Artificial Sequence
  synthetic sequence
ggatattaagcgc

SEQ ID NO: 3418 - DNA, 13 bp, Artificial Sequence
  synthetic sequence
tatgttcaacccg

SEQ ID NO: 3419 - DNA, 13 bp, Artificial Sequence
  synthetic sequence
agttgttaacaat

SEQ ID NO: 3420 - DNA, 13 bp, Artificial Sequence
  synthetic sequence
gcaagggccgagt

SEQ ID NO: 3421 - DNA, 13 bp, Artificial Sequence
  synthetic sequence
gcggttggagggc

SEQ ID NO: 3422 - DNA, 13 bp, Artificial Sequence
  synthetic sequence
cgcgagacatcac

SEQ ID NO: 3423 - DNA, 13 bp, Artificial Sequence
  synthetic sequence
agggggcaggtga

SEQ ID NO: 3424 - DNA, 13 bp, Artificial Sequence
  synthetic sequence
cagcaagattgaa

SEQ ID NO: 3425 - DNA, 13 bp, Artificial Sequence
  synthetic sequence
acaccaactgcag

SEQ ID NO: 3426 - DNA, 13 bp, Artificial Sequence
  synthetic sequence
cccagttcttttc

SEQ ID NO: 3427 - DNA, 13 bp, Artificial Sequence
  synthetic sequence
tgagaatgcaacg

SEQ ID NO: 3428 - DNA, 13 bp, Artificial Sequence
  synthetic sequence
cacggagggccga

SEQ ID NO: 3429 - DNA, 13 bp, Artificial Sequence
  synthetic sequence
ccggcgcaggcac

SEQ ID NO: 3430 - DNA, 13 bp, Artificial Sequence
  synthetic sequence
tcaaggagcccca

SEQ ID NO: 3431 - DNA, 13 bp, Artificial Sequence
  synthetic sequence
agtgccctataga

SEQ ID NO: 3432 - DNA, 13 bp, Artificial Sequence
  synthetic sequence
ccgcaaaacgggt

SEQ ID NO: 3433 - DNA, 13 bp, Artificial Sequence
  synthetic sequence
cattctcaaatac

SEQ ID NO: 3434 - DNA, 13 bp, Artificial Sequence
  synthetic sequence
caacagcacccac

SEQ ID NO: 3435 - DNA, 13 bp, Artificial Sequence
  synthetic sequence
ccaggaccaaata

SEQ ID NO: 3436 - DNA, 13 bp, Artificial Sequence
  synthetic sequence
cagtggactatat

SEQ ID NO: 3437 - DNA, 13 bp, Artificial Sequence
  synthetic sequence
cagaaaggattgg

SEQ ID NO: 3438 - DNA, 13 bp, Artificial Sequence
  synthetic sequence
ggcgcaatatagc

SEQ ID NO: 3439 - DNA, 13 bp, Artificial Sequence
  synthetic sequence
gaggccaaaagga

SEQ ID NO: 3440 - DNA, 13 bp, Artificial Sequence
  synthetic sequence
gagggcgagccgc

SEQ ID NO: 3441 - DNA, 13 bp, Artificial Sequence
  synthetic sequence
gacacatcacggt

SEQ ID NO: 3442 - DNA, 13 bp, Artificial Sequence
  synthetic sequence
cctcggtagcaga

SEQ ID NO: 3443 - DNA, 13 bp, Artificial Sequence
  synthetic sequence
gctccggcagcgg

SEQ ID NO: 3444 - DNA, 13 bp, Artificial Sequence
  synthetic sequence
cgttctcaaaaac

SEQ ID NO: 3445 - DNA, 13 bp, Artificial Sequence
  synthetic sequence
caggtggaagccc

SEQ ID NO: 3446 - DNA, 13 bp, Artificial Sequence
  synthetic sequence
gatgaaatcttaa

SEQ ID NO: 3447 - DNA, 13 bp, Artificial Sequence
  synthetic sequence
cctcaaaccaagc

SEQ ID NO: 3448 - DNA, 13 bp, Artificial Sequence
  synthetic sequence
tgagcacactatc

SEQ ID NO: 3449 - DNA, 13 bp, Artificial Sequence
  synthetic sequence
tcattttaagacg

SEQ ID NO: 3450 - DNA, 13 bp, Artificial Sequence
  synthetic sequence
aggcctgcagatg

SEQ ID NO: 3451 - DNA, 13 bp, Artificial Sequence
  synthetic sequence
acacggcagccag

SEQ ID NO: 3452 - DNA, 13 bp, Artificial Sequence
  synthetic sequence
caatggactatat

SEQ ID NO: 3453 - DNA, 13 bp, Artificial Sequence
  synthetic sequence
cgcaaaaggggtt

SEQ ID NO: 3454 - DNA, 13 bp, Artificial Sequence
  synthetic sequence
cacgatcgccatc

SEQ ID NO: 3455 - DNA, 13 bp, Artificial Sequence
  synthetic sequence
gagcgcgaaacgc

SEQ ID NO: 3456 - DNA, 13 bp, Artificial Sequence
  synthetic sequence
agttattgacaat

SEQ ID NO: 3457 - DNA, 13 bp, Artificial Sequence
  synthetic sequence
acaccaacagcag

SEQ ID NO: 3458 - DNA, 13 bp, Artificial Sequence
  synthetic sequence
acaagcttctggc

SEQ ID NO: 3459 - DNA, 13 bp, Artificial Sequence
  synthetic sequence
gcatgaatgatcg

SEQ ID NO: 3460 - DNA, 13 bp, Artificial Sequence
  synthetic sequence
aaacagcaaccgc

SEQ ID NO: 3461 - DNA, 13 bp, Artificial Sequence
  synthetic sequence
agtgttattccct

SEQ ID NO: 3462 - DNA, 13 bp, Artificial Sequence
  synthetic sequence
tcacaccaccaag

SEQ ID NO: 3463 - DNA, 13 bp, Artificial Sequence
  synthetic sequence
catctgggacagg

SEQ ID NO: 3464 - DNA, 13 bp, Artificial Sequence
  synthetic sequence
ataactagacatc

SEQ ID NO: 3465 - DNA, 13 bp, Artificial Sequence
  synthetic sequence
tccaattgggcct

SEQ ID NO: 3466 - DNA, 13 bp, Artificial Sequence
  synthetic sequence
cggaggacagaaa

SEQ ID NO: 3467 - DNA, 13 bp, Artificial Sequence
  synthetic sequence
tgcttggtagagg

SEQ ID NO: 3468 - DNA, 13 bp, Artificial Sequence
  synthetic sequence
cagaggtcaagct

SEQ ID NO: 3469 - DNA, 13 bp, Artificial Sequence
  synthetic sequence
ggcgaaggcgtcg

SEQ ID NO: 3470 - DNA, 13 bp, Artificial Sequence
  synthetic sequence
tatagtcaggagc

SEQ ID NO: 3471 - DNA, 13 bp, Artificial Sequence
  synthetic sequence
ctcgaataccatg

SEQ ID NO: 3472 - DNA, 13 bp, Artificial Sequence
  synthetic sequence
gcaggtggggcgg

SEQ ID NO: 3473 - DNA, 13 bp, Artificial Sequence
  synthetic sequence
ggtcgacaggggg

SEQ ID NO: 3474 - DNA, 13 bp, Artificial Sequence
  synthetic sequence
tggtgacaaatgg

SEQ ID NO: 3475 - DNA, 13 bp, Artificial Sequence
  synthetic sequence
gacatactcatgg

SEQ ID NO: 3476 - DNA, 13 bp, Artificial Sequence
  synthetic sequence
aattgttgacaat

SEQ ID NO: 3477 - DNA, 13 bp, Artificial Sequence
  synthetic sequence
ccacagaaagggt

SEQ ID NO: 3478 - DNA, 13 bp, Artificial Sequence
  synthetic sequence
gatggtatgccaa

SEQ ID NO: 3479 - DNA, 13 bp, Artificial Sequence
  synthetic sequence
aggatttcataaa

SEQ ID NO: 3480 - DNA, 13 bp, Artificial Sequence
  synthetic sequence
ccccggtataggg

SEQ ID NO: 3481 - DNA, 13 bp, Artificial Sequence
  synthetic sequence
cacaaaaggggtt

SEQ ID NO: 3482 - DNA, 13 bp, Artificial Sequence
  synthetic sequence
aggccaccaagca

SEQ ID NO: 3483 - DNA, 13 bp, Artificial Sequence
  synthetic sequence
gctgatggaaaca

SEQ ID NO: 3484 - DNA, 13 bp, Artificial Sequence
  synthetic sequence
gtgttagtataag

SEQ ID NO: 3485 - DNA, 13 bp, Artificial Sequence
  synthetic sequence
gctcgttccaaaa

SEQ ID NO: 3486 - DNA, 13 bp, Artificial Sequence
  synthetic sequence
tcgagctcaagca

SEQ ID NO: 3487 - DNA, 13 bp, Artificial Sequence
  synthetic sequence
gcggagcggcgac

SEQ ID NO: 3488 - DNA, 13 bp, Artificial Sequence
  synthetic sequence
gctgatggcagat

SEQ ID NO: 3489 - DNA, 13 bp, Artificial Sequence
  synthetic sequence
gaaggggtgggcc

SEQ ID NO: 3490 - DNA, 13 bp, Artificial Sequence
  synthetic sequence
tagagtgctgctg

SEQ ID NO: 3491 - DNA, 13 bp, Artificial Sequence
  synthetic sequence
actgaatctcggc

SEQ ID NO: 3492 - DNA, 13 bp, Artificial Sequence
  synthetic sequence
gatcaagcaaccc

SEQ ID NO: 3493 - DNA, 13 bp, Artificial Sequence
  synthetic sequence
gccagaaggagat

SEQ ID NO: 3494 - DNA, 13 bp, Artificial Sequence
  synthetic sequence
ggtggtccaattg

SEQ ID NO: 3495 - DNA, 13 bp, Artificial Sequence
  synthetic sequence
cccttcagcctcc

SEQ ID NO: 3496 - DNA, 13 bp, Artificial Sequence
  synthetic sequence
cacgccaaaaccc

SEQ ID NO: 3497 - DNA, 13 bp, Artificial Sequence
  synthetic sequence
gagagtcgtaatc

SEQ ID NO: 3498 - DNA, 13 bp, Artificial Sequence
  synthetic sequence
tcatcaaatacaa

SEQ ID NO: 3499 - DNA, 13 bp, Artificial Sequence
  synthetic sequence
tgcataggctgca

SEQ ID NO: 3500 - DNA, 13 bp, Artificial Sequence
  synthetic sequence
cctcagtagcgga

SEQ ID NO: 3501 - DNA, 13 bp, Artificial Sequence
  synthetic sequence
catcgaaaacaag

SEQ ID NO: 3502 - DNA, 13 bp, Artificial Sequence
  synthetic sequence
caaaggtcaagct

SEQ ID NO: 3503 - DNA, 13 bp, Artificial Sequence
  synthetic sequence
tttggggccaaaa

SEQ ID NO: 3504 - DNA, 13 bp, Artificial Sequence
  synthetic sequence
tggcttcaaacca

SEQ ID NO: 3505 - DNA, 13 bp, Artificial Sequence
  synthetic sequence
ggtacgcctgccg

SEQ ID NO: 3506 - DNA, 13 bp, Artificial Sequence
  synthetic sequence
gtgaacactaatt

SEQ ID NO: 3507 - DNA, 13 bp, Artificial Sequence
  synthetic sequence
agaatgcaacggc

SEQ ID NO: 3508 - DNA, 13 bp, Artificial Sequence
  synthetic sequence
cctccccaccagc

SEQ ID NO: 3509 - DNA, 13 bp, Artificial Sequence
  synthetic sequence
aatactgctgaat

SEQ ID NO: 3510 - DNA, 13 bp, Artificial Sequence
  synthetic sequence
cgatagccggttc

SEQ ID NO: 3511 - DNA, 13 bp, Artificial Sequence
  synthetic sequence
gggacacatcacg

SEQ ID NO: 3512 - DNA, 13 bp, Artificial Sequence
  synthetic sequence
caggagtgagctc

SEQ ID NO: 3513 - DNA, 13 bp, Artificial Sequence
  synthetic sequence
aaggggtattagt

SEQ ID NO: 3514 - DNA, 13 bp, Artificial Sequence
  synthetic sequence
ccacaaaaagggt

SEQ ID NO: 3515 - DNA, 13 bp, Artificial Sequence
  synthetic sequence
gcagtgatcacag

SEQ ID NO: 3516 - DNA, 13 bp, Artificial Sequence
  synthetic sequence
accatactggagc

SEQ ID NO: 3517 - DNA, 13 bp, Artificial Sequence
  synthetic sequence
ggctcagtcaggt

SEQ ID NO: 3518 - DNA, 13 bp, Artificial Sequence
  synthetic sequence
tgcggaacgttga

SEQ ID NO: 3519 - DNA, 13 bp, Artificial Sequence
  synthetic sequence
gccggcacaagcg

SEQ ID NO: 3520 - DNA, 13 bp, Artificial Sequence
  synthetic sequence
ccatgttccacac

SEQ ID NO: 3521 - DNA, 13 bp, Artificial Sequence
  synthetic sequence
catcgcggctgca

SEQ ID NO: 3522 - DNA, 13 bp, Artificial Sequence
  synthetic sequence
tagtacagccggc

SEQ ID NO: 3523 - DNA, 13 bp, Artificial Sequence
  synthetic sequence
acacatcacgact

SEQ ID NO: 3524 - DNA, 13 bp, Artificial Sequence
  synthetic sequence
ccgactgcagaaa

SEQ ID NO: 3525 - DNA, 13 bp, Artificial Sequence
  synthetic sequence
agttattgactat

SEQ ID NO: 3526 - DNA, 13 bp, Artificial Sequence
  synthetic sequence
ccccaattctttt

SEQ ID NO: 3527 - DNA, 13 bp, Artificial Sequence
  synthetic sequence
gggacccgcctgc

SEQ ID NO: 3528 - DNA, 13 bp, Artificial Sequence
  synthetic sequence
ccaaagatggacc

SEQ ID NO: 3529 - DNA, 13 bp, Artificial Sequence
  synthetic sequence
ctcgtcaaagaca

SEQ ID NO: 3530 - DNA, 13 bp, Artificial Sequence
  synthetic sequence
gaagaaccgagaa

SEQ ID NO: 3531 - DNA, 13 bp, Artificial Sequence
  synthetic sequence
tcagtggcggagt

SEQ ID NO: 3532 - DNA, 13 bp, Artificial Sequence
  synthetic sequence
ttagcagactccc

SEQ ID NO: 3533 - DNA, 13 bp, Artificial Sequence
  synthetic sequence
cacacgcacggcc

SEQ ID NO: 3534 - DNA, 13 bp, Artificial Sequence
  synthetic sequence
gagcctcaagctg

SEQ ID NO: 3535 - DNA, 13 bp, Artificial Sequence
  synthetic sequence
aacactagcttct

SEQ ID NO: 3536 - DNA, 13 bp, Artificial Sequence
  synthetic sequence
gcaagaacaccaa

SEQ ID NO: 3537 - DNA, 13 bp, Artificial Sequence
  synthetic sequence
gtatcgccctcgt

SEQ ID NO: 3538 - DNA, 13 bp, Artificial Sequence
  synthetic sequence
ttcctatctgtaa

SEQ ID NO: 3539 - DNA, 13 bp, Artificial Sequence
  synthetic sequence
ctataatcggggg

SEQ ID NO: 3540 - DNA, 13 bp, Artificial Sequence
  synthetic sequence
tgatgacaaatgg

SEQ ID NO: 3541 - DNA, 13 bp, Artificial Sequence
  synthetic sequence
ccgtcgtggatca

SEQ ID NO: 3542 - DNA, 13 bp, Artificial Sequence
  synthetic sequence
agaatactgttgg

SEQ ID NO: 3543 - DNA, 13 bp, Artificial Sequence
  synthetic sequence
tcttcccctccaa

SEQ ID NO: 3544 - DNA, 13 bp, Artificial Sequence
  synthetic sequence
gaggttgggaata

SEQ ID NO: 3545 - DNA, 13 bp, Artificial Sequence
  synthetic sequence
tggcatattgtca

SEQ ID NO: 3546 - DNA, 13 bp, Artificial Sequence
  synthetic sequence
ttccaaaatagag

SEQ ID NO: 3547 - DNA, 13 bp, Artificial Sequence
  synthetic sequence
gggccgatagctc

SEQ ID NO: 3548 - DNA, 13 bp, Artificial Sequence
  synthetic sequence
ctcgaaaaccttg

SEQ ID NO: 3549 - DNA, 13 bp, Artificial Sequence
  synthetic sequence
tcccgggtcttac

SEQ ID NO: 3550 - DNA, 13 bp, Artificial Sequence
  synthetic sequence
agaaggggttagc

SEQ ID NO: 3551 - DNA, 13 bp, Artificial Sequence
  synthetic sequence
ccccagaacagag

SEQ ID NO: 3552 - DNA, 13 bp, Artificial Sequence
  synthetic sequence
tagacactgtcgg

SEQ ID NO: 3553 - DNA, 13 bp, Artificial Sequence
  synthetic sequence
gaatccaacgctg

SEQ ID NO: 3554 - DNA, 13 bp, Artificial Sequence
  synthetic sequence
cacgctgcatgtg

SEQ ID NO: 3555 - DNA, 13 bp, Artificial Sequence
  synthetic sequence
caatctggccgcc

SEQ ID NO: 3556 - DNA, 13 bp, Artificial Sequence
  synthetic sequence
gctggcgcccatg

SEQ ID NO: 3557 - DNA, 13 bp, Artificial Sequence
  synthetic sequence
gccagaatgacat

SEQ ID NO: 3558 - DNA, 13 bp, Artificial Sequence
  synthetic sequence
cctgcaagccggc

SEQ ID NO: 3559 - DNA, 13 bp, Artificial Sequence
  synthetic sequence
gcccgttgcatat

SEQ ID NO: 3560 - DNA, 13 bp, Artificial Sequence
  synthetic sequence
caaagaaggtctt

SEQ ID NO: 3561 - DNA, 13 bp, Artificial Sequence
  synthetic sequence
agtgcactatatc

SEQ ID NO: 3562 - DNA, 13 bp, Artificial Sequence
  synthetic sequence
aaaaggggcgaga

SEQ ID NO: 3563 - DNA, 13 bp, Artificial Sequence
  synthetic sequence
agatggagatggc

SEQ ID NO: 3564 - DNA, 13 bp, Artificial Sequence
  synthetic sequence
gaaaaagggcgag

SEQ ID NO: 3565 - DNA, 13 bp, Artificial Sequence
  synthetic sequence
acactatcagaca

SEQ ID NO: 3566 - DNA, 13 bp, Artificial Sequence
  synthetic sequence
gctggatggtagt

SEQ ID NO: 3567 - DNA, 13 bp, Artificial Sequence
  synthetic sequence
ttggggccgacag

SEQ ID NO: 3568 - DNA, 13 bp, Artificial Sequence
  synthetic sequence
catcggggacagg

SEQ ID NO: 3569 - DNA, 13 bp, Artificial Sequence
  synthetic sequence
tgcgggatgttaa

SEQ ID NO: 3570 - DNA, 13 bp, Artificial Sequence
  synthetic sequence
gtgttggtgtagg

SEQ ID NO: 3571 - DNA, 13 bp, Artificial Sequence
  synthetic sequence
agcagatggggtg

SEQ ID NO: 3572 - DNA, 13 bp, Artificial Sequence
  synthetic sequence
cgccggggccaaa

SEQ ID NO: 3573 - DNA, 13 bp, Artificial Sequence
  synthetic sequence
gaccgccggcaat

SEQ ID NO: 3574 - DNA, 13 bp, Artificial Sequence
  synthetic sequence
agaatgttattcc

SEQ ID NO: 3575 - DNA, 13 bp, Artificial Sequence
  synthetic sequence
acctcatcacgcc

SEQ ID NO: 3576 - DNA, 13 bp, Artificial Sequence
  synthetic sequence
cgccaaccgcaga

SEQ ID NO: 3577 - DNA, 13 bp, Artificial Sequence
  synthetic sequence
atctggtaccgtg

SEQ ID NO: 3578 - DNA, 13 bp, Artificial Sequence
  synthetic sequence
tgtaactaagact

SEQ ID NO: 3579 - DNA, 13 bp, Artificial Sequence
  synthetic sequence
caaaatcaaccat

SEQ ID NO: 3580 - DNA, 13 bp, Artificial Sequence
  synthetic sequence
tctcaaacaccat

SEQ ID NO: 3581 - DNA, 13 bp, Artificial Sequence
  synthetic sequence
gcagtgcacagac

SEQ ID NO: 3582 - DNA, 13 bp, Artificial Sequence
  synthetic sequence
cgtcaaaaacgag

SEQ ID NO: 3583 - DNA, 13 bp, Artificial Sequence
  synthetic sequence
cattttcaaaaac

SEQ ID NO: 3584 - DNA, 13 bp, Artificial Sequence
  synthetic sequence
ggggccacagcat

SEQ ID NO: 3585 - DNA, 13 bp, Artificial Sequence
  synthetic sequence
cgcgagacgtcgc

SEQ ID NO: 3586 - DNA, 13 bp, Artificial Sequence
  synthetic sequence
aaccggcacaagc

SEQ ID NO: 3587 - DNA, 13 bp, Artificial Sequence
  synthetic sequence
cccaattcttctc

SEQ ID NO: 3588 - DNA, 13 bp, Artificial Sequence
  synthetic sequence
cataggggcaatt

SEQ ID NO: 3589 - DNA, 13 bp, Artificial Sequence
  synthetic sequence
tcatcaaacacaa

SEQ ID NO: 3590 - DNA, 13 bp, Artificial Sequence
  synthetic sequence
aatcactgcacgg

SEQ ID NO: 3591 - DNA, 13 bp, Artificial Sequence
  synthetic sequence
acaagctgcattt

SEQ ID NO: 3592 - DNA, 13 bp, Artificial Sequence
  synthetic sequence
cccaaaacagaga

SEQ ID NO: 3593 - DNA, 13 bp, Artificial Sequence
  synthetic sequence
cgagggcaccggt

SEQ ID NO: 3594 - DNA, 13 bp, Artificial Sequence
  synthetic sequence
gctcgctgcatgt

SEQ ID NO: 3595 - DNA, 13 bp, Artificial Sequence
  synthetic sequence
catgagcaacaat

SEQ ID NO: 3596 - DNA, 13 bp, Artificial Sequence
  synthetic sequence
tgttatttgttca

SEQ ID NO: 3597 - DNA, 13 bp, Artificial Sequence
  synthetic sequence
tgaactatatccg

SEQ ID NO: 3598 - DNA, 13 bp, Artificial Sequence
  synthetic sequence
acaaggccggaat

SEQ ID NO: 3599 - DNA, 13 bp, Artificial Sequence
  synthetic sequence
ccatcatgaatca

SEQ ID NO: 3600 - DNA, 13 bp, Artificial Sequence
  synthetic sequence
agtcaggggcaac

SEQ ID NO: 3601 - DNA, 13 bp, Artificial Sequence
  synthetic sequence
acccacagcagaa

SEQ ID NO: 3602 - DNA, 13 bp, Artificial Sequence
  synthetic sequence
tataactaagact

SEQ ID NO: 3603 - DNA, 13 bp, Artificial Sequence
  synthetic sequence
ctctggtggcaaa

SEQ ID NO: 3604 - DNA, 13 bp, Artificial Sequence
  synthetic sequence
ctgacgggaagag

SEQ ID NO: 3605 - DNA, 13 bp, Artificial Sequence
  synthetic sequence
taaaaattgtgca

SEQ ID NO: 3606 - DNA, 13 bp, Artificial Sequence
  synthetic sequence
acatcagggacag

SEQ ID NO: 3607 - DNA, 13 bp, Artificial Sequence
  synthetic sequence
ggcataactaaga

SEQ ID NO: 3608 - DNA, 13 bp, Artificial Sequence
  synthetic sequence
ccgacctcggtgg

SEQ ID NO: 3609 - DNA, 13 bp, Artificial Sequence
  synthetic sequence
ttggtccgttggg

SEQ ID NO: 3610 - DNA, 13 bp, Artificial Sequence
  synthetic sequence
agcggctggaggg

SEQ ID NO: 3611 - DNA, 13 bp, Artificial Sequence
  synthetic sequence
gcacgaagaactg

SEQ ID NO: 3612 - DNA, 13 bp, Artificial Sequence
  synthetic sequence
ccgtcatgaatca

SEQ ID NO: 3613 - DNA, 13 bp, Artificial Sequence
  synthetic sequence
acaaacttgccaa

SEQ ID NO: 3614 - DNA, 13 bp, Artificial Sequence
  synthetic sequence
acggcatgtatta

SEQ ID NO: 3615 - DNA, 13 bp, Artificial Sequence
  synthetic sequence
gtgcgagagcgtc

SEQ ID NO: 3616 - DNA, 13 bp, Artificial Sequence
  synthetic sequence
aacagatggcagg

SEQ ID NO: 3617 - DNA, 13 bp, Artificial Sequence
  synthetic sequence
atcactctttggc

SEQ ID NO: 3618 - DNA, 13 bp, Artificial Sequence
  synthetic sequence
tgatgacagcatg

SEQ ID NO: 3619 - DNA, 13 bp, Artificial Sequence
  synthetic sequence
tcaacataattgg

SEQ ID NO: 3620 - DNA, 13 bp, Artificial Sequence
  synthetic sequence
ctgaaaatccata

SEQ ID NO: 3621 - DNA, 13 bp, Artificial Sequence
  synthetic sequence
gtacaaatggcag

SEQ ID NO: 3622 - DNA, 13 bp, Artificial Sequence
  synthetic sequence
tggacatatcaaa

SEQ ID NO: 3623 - DNA, 13 bp, Artificial Sequence
  synthetic sequence
gtctccatagaat

SEQ ID NO: 3624 - DNA, 13 bp, Artificial Sequence
  synthetic sequence
tagtaacagactc

SEQ ID NO: 3625 - DNA, 13 bp, Artificial Sequence
  synthetic sequence
atcaacagctcct

SEQ ID NO: 3626 - DNA, 13 bp, Artificial Sequence
  synthetic sequence
tatgtaggatctg

SEQ ID NO: 3627 - DNA, 13 bp, Artificial Sequence
  synthetic sequence
atgcaaatgttaa

SEQ ID NO: 3628 - DNA, 13 bp, Artificial Sequence
  synthetic sequence
tggagagcaatgg

SEQ ID NO: 3629 - DNA, 13 bp, Artificial Sequence
  synthetic sequence
cagcagaaacagg

SEQ ID NO: 3630 - DNA, 13 bp, Artificial Sequence
  synthetic sequence
tttaacatgtgga

SEQ ID NO: 3631 - DNA, 13 bp, Artificial Sequence
  synthetic sequence
attgggcaagtca

SEQ ID NO: 3632 - DNA, 13 bp, Artificial Sequence
  synthetic sequence
aaattatggtacc

SEQ ID NO: 3633 - DNA, 13 bp, Artificial Sequence
  synthetic sequence
tggggatacttgg

SEQ ID NO: 3634 - DNA, 13 bp, Artificial Sequence
  synthetic sequence
aatgagacaccag

SEQ ID NO: 3635 - DNA, 13 bp, Artificial Sequence
  synthetic sequence
tatggggtacctg

SEQ ID NO: 3636 - DNA, 13 bp, Artificial Sequence
  synthetic sequence
ctctcgacgcagg

SEQ ID NO: 3637 - DNA, 13 bp, Artificial Sequence
  synthetic sequence
aattaccctatag

SEQ ID NO: 3638 - DNA, 13 bp, Artificial Sequence
  synthetic sequence
gacctggaggagg

SEQ ID NO: 3639 - DNA, 13 bp, Artificial Sequence
  synthetic sequence
caggatcagaaga

SEQ ID NO: 3640 - DNA, 13 bp, Artificial Sequence
  synthetic sequence
taaacatgtggca

SEQ ID NO: 3641 - DNA, 13 bp, Artificial Sequence
  synthetic sequence
attctaaagtgta

SEQ ID NO: 3642 - DNA, 13 bp, Artificial Sequence
  synthetic sequence
aagcacattgtaa

SEQ ID NO: 3643 - DNA, 13 bp, Artificial Sequence
  synthetic sequence
gaaaagaatgaac

SEQ ID NO: 3644 - DNA, 13 bp, Artificial Sequence
  synthetic sequence
tcaaagcagtaag

SEQ ID NO: 3645 - DNA, 13 bp, Artificial Sequence
  synthetic sequence
ccacctttgccta

SEQ ID NO: 3646 - DNA, 13 bp, Artificial Sequence
  synthetic sequence
ttaattgtggagg

SEQ ID NO: 3647 - DNA, 13 bp, Artificial Sequence
  synthetic sequence
actcacctttgtc

SEQ ID NO: 3648 - DNA, 13 bp, Artificial Sequence
  synthetic sequence
ggaacttctggga

SEQ ID NO: 3649 - DNA, 13 bp, Artificial Sequence
  synthetic sequence
ccacctctgccta

SEQ ID NO: 3650 - DNA, 13 bp, Artificial Sequence
  synthetic sequence
aaaccataatagt

SEQ ID NO: 3651 - DNA, 13 bp, Artificial Sequence
  synthetic sequence
tgctattgtaaaa

SEQ ID NO: 3652 - DNA, 13 bp, Artificial Sequence
  synthetic sequence
ccaaagcagtaag

SEQ ID NO: 3653 - DNA, 13 bp, Artificial Sequence
  synthetic sequence
aattatcctatag

SEQ ID NO: 3654 - DNA, 13 bp, Artificial Sequence
  synthetic sequence
agacaggaacaga

SEQ ID NO: 3655 - DNA, 13 bp, Artificial Sequence
  synthetic sequence
gaatttttctatt

SEQ ID NO: 3656 - DNA, 13 bp, Artificial Sequence
  synthetic sequence
gaaacagcatact

SEQ ID NO: 3657 - DNA, 13 bp, Artificial Sequence
  synthetic sequence
accatacctagta

SEQ ID NO: 3658 - DNA, 13 bp, Artificial Sequence
  synthetic sequence
aatagacaggtta

SEQ ID NO: 3659 - DNA, 13 bp, Artificial Sequence
  synthetic sequence
gctggttttgcga

SEQ ID NO: 3660 - DNA, 13 bp, Artificial Sequence
  synthetic sequence
taaactgggcaag

SEQ ID NO: 3661 - DNA, 13 bp, Artificial Sequence
  synthetic sequence
tgttggaaatgtg

SEQ ID NO: 3662 - DNA, 13 bp, Artificial Sequence
  synthetic sequence
tttgtcaataccc

SEQ ID NO: 3663 - DNA, 13 bp, Artificial Sequence
  synthetic sequence
cgagagcgtcagt

SEQ ID NO: 3664 - DNA, 13 bp, Artificial Sequence
  synthetic sequence
tttcgggtttatt

SEQ ID NO: 3665 - DNA, 13 bp, Artificial Sequence
  synthetic sequence
gaagcactatggg

SEQ ID NO: 3666 - DNA, 13 bp, Artificial Sequence
  synthetic sequence
taaatatgtggca

SEQ ID NO: 3667 - DNA, 13 bp, Artificial Sequence
  synthetic sequence
taggagatataag

SEQ ID NO: 3668 - DNA, 13 bp, Artificial Sequence
  synthetic sequence
taatagtacagct

SEQ ID NO: 3669 - DNA, 13 bp, Artificial Sequence
  synthetic sequence
tgttactgtaaaa

SEQ ID NO: 3670 - DNA, 13 bp, Artificial Sequence
  synthetic sequence
ggaggagatatga

SEQ ID NO: 3671 - DNA, 13 bp, Artificial Sequence
  synthetic sequence
gaaagatacctaa

SEQ ID NO: 3672 - DNA, 13 bp, Artificial Sequence
  synthetic sequence
tgtgggtcacagt

SEQ ID NO: 3673 - DNA, 13 bp, Artificial Sequence
  synthetic sequence
ccagctggttatg

SEQ ID NO: 3674 - DNA, 13 bp, Artificial Sequence
  synthetic sequence
gtcagcctaaaac

SEQ ID NO: 3675 - DNA, 13 bp, Artificial Sequence
  synthetic sequence
tagtaacagattc

SEQ ID NO: 3676 - DNA, 13 bp, Artificial Sequence
  synthetic sequence
atatctatgaaac

SEQ ID NO: 3677 - DNA, 13 bp, Artificial Sequence
  synthetic sequence
cacagcaattgga

SEQ ID NO: 3678 - DNA, 13 bp, Artificial Sequence
  synthetic sequence
ttaagacagcagt

SEQ ID NO: 3679 - DNA, 13 bp, Artificial Sequence
  synthetic sequence
aaaacaataatag

SEQ ID NO: 3680 - DNA, 13 bp, Artificial Sequence
  synthetic sequence
ttgtaacacctca

SEQ ID NO: 3681 - DNA, 13 bp, Artificial Sequence
  synthetic sequence
tagaaatagggca

SEQ ID NO: 3682 - DNA, 13 bp, Artificial Sequence
  synthetic sequence
caggagaaagaga

SEQ ID NO: 3683 - DNA, 13 bp, Artificial Sequence
  synthetic sequence
ttgaagaatcgca

SEQ ID NO: 3684 - DNA, 13 bp, Artificial Sequence
  synthetic sequence
aaaataacatggt

SEQ ID NO: 3685 - DNA, 13 bp, Artificial Sequence
  synthetic sequence
tgtgggttacagt

SEQ ID NO: 3686 - DNA, 13 bp, Artificial Sequence
  synthetic sequence
tgcagatgttaaa

SEQ ID NO: 3687 - DNA, 13 bp, Artificial Sequence
  synthetic sequence
taggctttccagt

SEQ ID NO: 3688 - DNA, 13 bp, Artificial Sequence
  synthetic sequence
gagccagcagcag

SEQ ID NO: 3689 - DNA, 13 bp, Artificial Sequence
  synthetic sequence
aatctgaaaacag

SEQ ID NO: 3690 - DNA, 13 bp, Artificial Sequence
  synthetic sequence
caaaaccagcagg

SEQ ID NO: 3691 - DNA, 13 bp, Artificial Sequence
  synthetic sequence
tatttgccataaa

SEQ ID NO: 3692 - DNA, 13 bp, Artificial Sequence
  synthetic sequence
ccagagcagtaag

SEQ ID NO: 3693 - DNA, 13 bp, Artificial Sequence
  synthetic sequence
ggaggaaatatga

SEQ ID NO: 3694 - DNA, 13 bp, Artificial Sequence
  synthetic sequence
tgttattgtaaaa

SEQ ID NO: 3695 - DNA, 13 bp, Artificial Sequence
  synthetic sequence
taagaatgtatag

SEQ ID NO: 3696 - DNA, 13 bp, Artificial Sequence
  synthetic sequence
cagaaccagcagg

SEQ ID NO: 3697 - DNA, 13 bp, Artificial Sequence
  synthetic sequence
aatttttctactg

SEQ ID NO: 3698 - DNA, 13 bp, Artificial Sequence
  synthetic sequence
aaagaaaaataga

SEQ ID NO: 3699 - DNA, 13 bp, Artificial Sequence
  synthetic sequence
tgcaaatgctaaa

SEQ ID NO: 3700 - DNA, 13 bp, Artificial Sequence
  synthetic sequence
tcacaaacaatgc

SEQ ID NO: 3701 - DNA, 13 bp, Artificial Sequence
  synthetic sequence
taataggagacat

SEQ ID NO: 3702 - DNA, 13 bp, Artificial Sequence
  synthetic sequence
taggacctacacc

SEQ ID NO: 3703 - DNA, 13 bp, Artificial Sequence
  synthetic sequence
tcgtttcagaccc

SEQ ID NO: 3704 - DNA, 13 bp, Artificial Sequence
  synthetic sequence
cttaaatcattat

SEQ ID NO: 3705 - DNA, 13 bp, Artificial Sequence
  synthetic sequence
ccaaagcagtgag

SEQ ID NO: 3706 - DNA, 13 bp, Artificial Sequence
  synthetic sequence
ggagtaggagcag

SEQ ID NO: 3707 - DNA, 13 bp, Artificial Sequence
  synthetic sequence
cagatgcatgagg

SEQ ID NO: 3708 - DNA, 13 bp, Artificial Sequence
  synthetic sequence
atataagacaagc

SEQ ID NO: 3709 - DNA, 13 bp, Artificial Sequence
  synthetic sequence
tggagatacttgg

SEQ ID NO: 3710 - DNA, 13 bp, Artificial Sequence
  synthetic sequence
attgggcaagcca

SEQ ID NO: 3711 - DNA, 13 bp, Artificial Sequence
  synthetic sequence
ttgtaatacctca

SEQ ID NO: 3712 - DNA, 13 bp, Artificial Sequence
  synthetic sequence
gtcagccaaaatt

SEQ ID NO: 3713 - DNA, 13 bp, Artificial Sequence
  synthetic sequence
cacagtaattgga

SEQ ID NO: 3714 - DNA, 13 bp, Artificial Sequence
  synthetic sequence
aaaggaaaataga

SEQ ID NO: 3715 - DNA, 13 bp, Artificial Sequence
  synthetic sequence
aatgaaacaccag

SEQ ID NO: 3716 - DNA, 13 bp, Artificial Sequence
  synthetic sequence
aaattatggtatc

SEQ ID NO: 3717 - DNA, 13 bp, Artificial Sequence
  synthetic sequence
gtaggacaagcaa

SEQ ID NO: 3718 - DNA, 13 bp, Artificial Sequence
  synthetic sequence
tagaagaaatgat

SEQ ID NO: 3719 - DNA, 13 bp, Artificial Sequence
  synthetic sequence
cactaacagcatt

SEQ ID NO: 3720 - DNA, 13 bp, Artificial Sequence
  synthetic sequence
aaaaacataatag

SEQ ID NO: 3721 - DNA, 13 bp, Artificial Sequence
  synthetic sequence
gcgtcaatattaa

SEQ ID NO: 3722 - DNA, 13 bp, Artificial Sequence
  synthetic sequence
gagggaacccgac

SEQ ID NO: 3723 - DNA, 13 bp, Artificial Sequence
  synthetic sequence
tgctattgtaaac

SEQ ID NO: 3724 - DNA, 13 bp, Artificial Sequence
  synthetic sequence
aatctaaaaacag

SEQ ID NO: 3725 - DNA, 13 bp, Artificial Sequence
  synthetic sequence
tatgcattaggaa

SEQ ID NO: 3726 - DNA, 13 bp, Artificial Sequence
  synthetic sequence
aggactcggcttg

SEQ ID NO: 3727 - DNA, 13 bp, Artificial Sequence
  synthetic sequence
cttagatcattat

SEQ ID NO: 3728 - DNA, 13 bp, Artificial Sequence
  synthetic sequence
gagaccttcagac

SEQ ID NO: 3729 - DNA, 13 bp, Artificial Sequence
  synthetic sequence
tagtgcaaaatgc

SEQ ID NO: 3730 - DNA, 13 bp, Artificial Sequence
  synthetic sequence
gtcagcctacaac

SEQ ID NO: 3731 - DNA, 13 bp, Artificial Sequence
  synthetic sequence
tgggacgcagcag

SEQ ID NO: 3732 - DNA, 13 bp, Artificial Sequence
  synthetic sequence
tatttgctataaa

SEQ ID NO: 3733 - DNA, 13 bp, Artificial Sequence
  synthetic sequence
cagcagagacagg

SEQ ID NO: 3734 - DNA, 13 bp, Artificial Sequence
  synthetic sequence
tcatttcagaccc

SEQ ID NO: 3735 - DNA, 13 bp, Artificial Sequence
  synthetic sequence
ccagctggttttg

SEQ ID NO: 3736 - DNA, 13 bp, Artificial Sequence
  synthetic sequence
taataaattgcaa

SEQ ID NO: 3737 - DNA, 13 bp, Artificial Sequence
  synthetic sequence
tttccagtcagac

SEQ ID NO: 3738 - DNA, 13 bp, Artificial Sequence
  synthetic sequence
atgatttgtatgt

SEQ ID NO: 3739 - DNA, 13 bp, Artificial Sequence
  synthetic sequence
gcactgaaagcat

SEQ ID NO: 3740 - DNA, 13 bp, Artificial Sequence
  synthetic sequence
tcaaagcagtgag

SEQ ID NO: 3741 - DNA, 13 bp, Artificial Sequence
  synthetic sequence
ccatcagccccac

SEQ ID NO: 3742 - DNA, 13 bp, Artificial Sequence
  synthetic sequence
gaaaagcatattg

SEQ ID NO: 3743 - DNA, 13 bp, Artificial Sequence
  synthetic sequence
ttgaagactcgca

SEQ ID NO: 3744 - DNA, 13 bp, Artificial Sequence
  synthetic sequence
aagataccatcaa

SEQ ID NO: 3745 - DNA, 13 bp, Artificial Sequence
  synthetic sequence
tggcatttgggtc

SEQ ID NO: 3746 - DNA, 13 bp, Artificial Sequence
  synthetic sequence
tatggggacactt

SEQ ID NO: 3747 - DNA, 13 bp, Artificial Sequence
  synthetic sequence
atgtaggatcaga

SEQ ID NO: 3748 - DNA, 13 bp, Artificial Sequence
  synthetic sequence
cgaggactgtgga

SEQ ID NO: 3749 - DNA, 13 bp, Artificial Sequence
  synthetic sequence
gtaggaaaagcaa

SEQ ID NO: 3750 - DNA, 13 bp, Artificial Sequence
  synthetic sequence
tatggggatacct

SEQ ID NO: 3751 - DNA, 13 bp, Artificial Sequence
  synthetic sequence
aaaaagtgttgct

SEQ ID NO: 3752 - DNA, 13 bp, Artificial Sequence
  synthetic sequence
tttaattgtagag

SEQ ID NO: 3753 - DNA, 13 bp, Artificial Sequence
  synthetic sequence
tatataatacagt

SEQ ID NO: 3754 - DNA, 13 bp, Artificial Sequence
  synthetic sequence
tgattgtgtggca

SEQ ID NO: 3755 - DNA, 13 bp, Artificial Sequence
  synthetic sequence
ccggctggttttg

SEQ ID NO: 3756 - DNA, 13 bp, Artificial Sequence
  synthetic sequence
tgggagtttgtta

SEQ ID NO: 3757 - DNA, 13 bp, Artificial Sequence
  synthetic sequence
aaaatgacatggt

SEQ ID NO: 3758 - DNA, 13 bp, Artificial Sequence
  synthetic sequence
taatagtacatct

SEQ ID NO: 3759 - DNA, 13 bp, Artificial Sequence
  synthetic sequence
tggggctgctctg

SEQ ID NO: 3760 - DNA, 13 bp, Artificial Sequence
  synthetic sequence
tataggttgataa

SEQ ID NO: 3761 - DNA, 13 bp, Artificial Sequence
  synthetic sequence
agtatactgcatt

SEQ ID NO: 3762 - DNA, 13 bp, Artificial Sequence
  synthetic sequence
taattgatagaat

SEQ ID NO: 3763 - DNA, 13 bp, Artificial Sequence
  synthetic sequence
ccacctttaccta

SEQ ID NO: 3764 - DNA, 13 bp, Artificial Sequence
  synthetic sequence
gtcagtcaaaatt

SEQ ID NO: 3765 - DNA, 13 bp, Artificial Sequence
  synthetic sequence
tcagagcagtaag

SEQ ID NO: 3766 - DNA, 13 bp, Artificial Sequence
  synthetic sequence
aaatcataatagt

SEQ ID NO: 3767 - DNA, 13 bp, Artificial Sequence
  synthetic sequence
aagaagaacatga

SEQ ID NO: 3768 - DNA, 13 bp, Artificial Sequence
  synthetic sequence
attctaaaatgta

SEQ ID NO: 3769 - DNA, 13 bp, Artificial Sequence
  synthetic sequence
actcacccttgtc

SEQ ID NO: 3770 - DNA, 13 bp, Artificial Sequence
  synthetic sequence
aggaccagcagga

SEQ ID NO: 3771 - DNA, 13 bp, Artificial Sequence
  synthetic sequence
actcaccattgtc

SEQ ID NO: 3772 - DNA, 13 bp, Artificial Sequence
  synthetic sequence
actgcttgtaaca

SEQ ID NO: 3773 - DNA, 13 bp, Artificial Sequence
  synthetic sequence
gggattaaagtaa

SEQ ID NO: 3774 - DNA, 13 bp, Artificial Sequence
  synthetic sequence
ccaacagccccac

SEQ ID NO: 3775 - DNA, 13 bp, Artificial Sequence
  synthetic sequence
cagcagcagaagg

SEQ ID NO: 3776 - DNA, 13 bp, Artificial Sequence
  synthetic sequence
agatcttcagacc

SEQ ID NO: 3777 - DNA, 13 bp, Artificial Sequence
  synthetic sequence
tgttattgtaaac

SEQ ID NO: 3778 - DNA, 13 bp, Artificial Sequence
  synthetic sequence
aatagactggtta

SEQ ID NO: 3779 - DNA, 13 bp, Artificial Sequence
  synthetic sequence
catagcaattgga

SEQ ID NO: 3780 - DNA, 13 bp, Artificial Sequence
  synthetic sequence
gatgacttgtatg

SEQ ID NO: 3781 - DNA, 13 bp, Artificial Sequence
  synthetic sequence
tcacagacaatgc

SEQ ID NO: 3782 - DNA, 13 bp, Artificial Sequence
  synthetic sequence
tgggacacagcag

SEQ ID NO: 3783 - DNA, 13 bp, Artificial Sequence
  synthetic sequence
tacttgatagaat

SEQ ID NO: 3784 - DNA, 13 bp, Artificial Sequence
  synthetic sequence
tatcaagagccat

SEQ ID NO: 3785 - DNA, 13 bp, Artificial Sequence
  synthetic sequence
tattaagcggggg

SEQ ID NO: 3786 - DNA, 13 bp, Artificial Sequence
  synthetic sequence
acataagacaagc

SEQ ID NO: 3787 - DNA, 13 bp, Artificial Sequence
  synthetic sequence
cactgacagcatt

SEQ ID NO: 3788 - DNA, 13 bp, Artificial Sequence
  synthetic sequence
agaatgtggcaga

SEQ ID NO: 3789 - DNA, 13 bp, Artificial Sequence
  synthetic sequence
ataaaagatggat

SEQ ID NO: 3790 - DNA, 13 bp, Artificial Sequence
  synthetic sequence
cagcagcagaggg

SEQ ID NO: 3791 - DNA, 13 bp, Artificial Sequence
  synthetic sequence
tctattatggggt

SEQ ID NO: 3792 - DNA, 13 bp, Artificial Sequence
  synthetic sequence
tataggttaataa

SEQ ID NO: 3793 - DNA, 13 bp, Artificial Sequence
  synthetic sequence
aagcacaagagga

SEQ ID NO: 3794 - DNA, 13 bp, Artificial Sequence
  synthetic sequence
actcacctctgtc

SEQ ID NO: 3795 - DNA, 13 bp, Artificial Sequence
  synthetic sequence
aggggatataaga

SEQ ID NO: 3796 - DNA, 13 bp, Artificial Sequence
  synthetic sequence
agggggagatatg

SEQ ID NO: 3797 - DNA, 13 bp, Artificial Sequence
  synthetic sequence
caagaaaagaatg

SEQ ID NO: 3798 - DNA, 13 bp, Artificial Sequence
  synthetic sequence
gggggacatcaag

SEQ ID NO: 3799 - DNA, 13 bp, Artificial Sequence
  synthetic sequence
atatgtggaaaaa

SEQ ID NO: 3800 - DNA, 13 bp, Artificial Sequence
  synthetic sequence
tgtgctccagctg

SEQ ID NO: 3801 - DNA, 13 bp, Artificial Sequence
  synthetic sequence
ttggaagaaatat

SEQ ID NO: 3802 - DNA, 13 bp, Artificial Sequence
  synthetic sequence
cagcagatggggt

SEQ ID NO: 3803 - DNA, 13 bp, Artificial Sequence
  synthetic sequence
ctctcaagacagg

SEQ ID NO: 3804 - DNA, 13 bp, Artificial Sequence
  synthetic sequence
tggggttgctctg

SEQ ID NO: 3805 - DNA, 13 bp, Artificial Sequence
  synthetic sequence
gtcagcctaagac

SEQ ID NO: 3806 - DNA, 13 bp, Artificial Sequence
  synthetic sequence
gtacagatggcag

SEQ ID NO: 3807 - DNA, 13 bp, Artificial Sequence
  synthetic sequence
ataggaaatataa

SEQ ID NO: 3808 - DNA, 13 bp, Artificial Sequence
  synthetic sequence
actcaccattatc

SEQ ID NO: 3809 - DNA, 13 bp, Artificial Sequence
  synthetic sequence
gttggaagtgtgg

SEQ ID NO: 3810 - DNA, 13 bp, Artificial Sequence
  synthetic sequence
aagttccagagaa

SEQ ID NO: 3811 - DNA, 13 bp, Artificial Sequence
  synthetic sequence
tttaatacagtag

SEQ ID NO: 3812 - DNA, 13 bp, Artificial Sequence
  synthetic sequence
atcattcaagcac

SEQ ID NO: 3813 - DNA, 13 bp, Artificial Sequence
  synthetic sequence
caggaacaaaatg

SEQ ID NO: 3814 - DNA, 13 bp, Artificial Sequence
  synthetic sequence
tttgggacagacc

SEQ ID NO: 3815 - DNA, 13 bp, Artificial Sequence
  synthetic sequence
taatagtacacct

SEQ ID NO: 3816 - DNA, 13 bp, Artificial Sequence
  synthetic sequence
ataacaggagata

SEQ ID NO: 3817 - DNA, 13 bp, Artificial Sequence
  synthetic sequence
cagaagttatccc

SEQ ID NO: 3818 - DNA, 13 bp, Artificial Sequence
  synthetic sequence
gatcatcaaaatc

SEQ ID NO: 3819 - DNA, 13 bp, Artificial Sequence
  synthetic sequence
tctactatggggt

SEQ ID NO: 3820 - DNA, 13 bp, Artificial Sequence
  synthetic sequence
cctatagtgcaga

SEQ ID NO: 3821 - DNA, 13 bp, Artificial Sequence
  synthetic sequence
tatggagtacctg

SEQ ID NO: 3822 - DNA, 13 bp, Artificial Sequence
  synthetic sequence
caggagaaaagga

SEQ ID NO: 3823 - DNA, 13 bp, Artificial Sequence
  synthetic sequence
tgggagtttgtca

SEQ ID NO: 3824 - DNA, 13 bp, Artificial Sequence
  synthetic sequence
cacccttgcctag

SEQ ID NO: 3825 - DNA, 13 bp, Artificial Sequence
  synthetic sequence
tgctattgcaaaa

SEQ ID NO: 3826 - DNA, 13 bp, Artificial Sequence
  synthetic sequence
aggaaattggtaa

SEQ ID NO: 3827 - DNA, 13 bp, Artificial Sequence
  synthetic sequence
taatagtacagtt

SEQ ID NO: 3828 - DNA, 13 bp, Artificial Sequence
  synthetic sequence
ctgagccagcagc

SEQ ID NO: 3829 - DNA, 13 bp, Artificial Sequence
  synthetic sequence
gaaaatggatagt

SEQ ID NO: 3830 - DNA, 13 bp, Artificial Sequence
  synthetic sequence
gggatgggggaag

SEQ ID NO: 3831 - DNA, 13 bp, Artificial Sequence
  synthetic sequence
tgtgctccagcag

SEQ ID NO: 3832 - DNA, 13 bp, Artificial Sequence
  synthetic sequence
caatggacatacc

SEQ ID NO: 3833 - DNA, 13 bp, Artificial Sequence
  synthetic sequence
atgaaaaatatca

SEQ ID NO: 3834 - DNA, 13 bp, Artificial Sequence
  synthetic sequence
ctgaaaatcctta

SEQ ID NO: 3835 - DNA, 13 bp, Artificial Sequence
  synthetic sequence
atgatttatatgt

SEQ ID NO: 3836 - DNA, 13 bp, Artificial Sequence
  synthetic sequence
tatggagacactt

SEQ ID NO: 3837 - DNA, 13 bp, Artificial Sequence
  synthetic sequence
gagtttttctatt

SEQ ID NO: 3838 - DNA, 13 bp, Artificial Sequence
  synthetic sequence
aaacctccgacgc

SEQ ID NO: 3839 - DNA, 13 bp, Artificial Sequence
  synthetic sequence
ggagaaaaatgaa

SEQ ID NO: 3840 - DNA, 13 bp, Artificial Sequence
  synthetic sequence
gagagcttcaggt

SEQ ID NO: 3841 - DNA, 13 bp, Artificial Sequence
  synthetic sequence
tcgttgcagaccc

SEQ ID NO: 3842 - DNA, 13 bp, Artificial Sequence
  synthetic sequence
ataatagtacaac

SEQ ID NO: 3843 - DNA, 13 bp, Artificial Sequence
  synthetic sequence
actagcagcatta

SEQ ID NO: 3844 - DNA, 13 bp, Artificial Sequence
  synthetic sequence
ggagtgggaggac

SEQ ID NO: 3845 - DNA, 13 bp, Artificial Sequence
  synthetic sequence
taatagtgcagct

SEQ ID NO: 3846 - DNA, 13 bp, Artificial Sequence
  synthetic sequence
ttgggttcttagg

SEQ ID NO: 3847 - DNA, 13 bp, Artificial Sequence
  synthetic sequence
ctcttcagacagg

SEQ ID NO: 3848 - DNA, 13 bp, Artificial Sequence
  synthetic sequence
aatgagaccccag

SEQ ID NO: 3849 - DNA, 13 bp, Artificial Sequence
  synthetic sequence
cagcagcaacagg

SEQ ID NO: 3850 - DNA, 13 bp, Artificial Sequence
  synthetic sequence
ccatacaatactc

SEQ ID NO: 3851 - DNA, 13 bp, Artificial Sequence
  synthetic sequence
aaaattacatggt

SEQ ID NO: 3852 - DNA, 13 bp, Artificial Sequence
  synthetic sequence
gaaaccttcagac

SEQ ID NO: 3853 - DNA, 13 bp, Artificial Sequence
  synthetic sequence
tcagactcatcaa

SEQ ID NO: 3854 - DNA, 13 bp, Artificial Sequence
  synthetic sequence
tttggcaacgacc

SEQ ID NO: 3855 - DNA, 13 bp, Artificial Sequence
  synthetic sequence
aatcgcagaacca

SEQ ID NO: 3856 - DNA, 13 bp, Artificial Sequence
  synthetic sequence
actgcttgtaata

SEQ ID NO: 3857 - DNA, 13 bp, Artificial Sequence
  synthetic sequence
tgcagaataaagc

SEQ ID NO: 3858 - DNA, 13 bp, Artificial Sequence
  synthetic sequence
tcagcaactccta

SEQ ID NO: 3859 - DNA, 13 bp, Artificial Sequence
  synthetic sequence
ctctcgacgcaag

SEQ ID NO: 3860 - DNA, 13 bp, Artificial Sequence
  synthetic sequence
tattacagggaca

SEQ ID NO: 3861 - DNA, 13 bp, Artificial Sequence
  synthetic sequence
ccataggaggaca

SEQ ID NO: 3862 - DNA, 13 bp, Artificial Sequence
  synthetic sequence
agatgggtgcgag

SEQ ID NO: 3863 - DNA, 13 bp, Artificial Sequence
  synthetic sequence
actccttgtaata

SEQ ID NO: 3864 - DNA, 13 bp, Artificial Sequence
  synthetic sequence
ttcagacctgcag

SEQ ID NO: 3865 - DNA, 13 bp, Artificial Sequence
  synthetic sequence
atcaacccctctc

SEQ ID NO: 3866 - DNA, 13 bp, Artificial Sequence
  synthetic sequence
ttgtaacattagt

SEQ ID NO: 3867 - DNA, 13 bp, Artificial Sequence
  synthetic sequence
ccgcctttgccta

SEQ ID NO: 3868 - DNA, 13 bp, Artificial Sequence
  synthetic sequence
ggcttcccagtca

SEQ ID NO: 3869 - DNA, 13 bp, Artificial Sequence
  synthetic sequence
acaggaaacagca

SEQ ID NO: 3870 - DNA, 13 bp, Artificial Sequence
  synthetic sequence
gcaggtagcacta

SEQ ID NO: 3871 - DNA, 13 bp, Artificial Sequence
  synthetic sequence
taattggaagaaa

SEQ ID NO: 3872 - DNA, 13 bp, Artificial Sequence
  synthetic sequence
ctcccctacccag

SEQ ID NO: 3873 - DNA, 13 bp, Artificial Sequence
  synthetic sequence
gtcaaaattaccc

SEQ ID NO: 3874 - DNA, 13 bp, Artificial Sequence
  synthetic sequence
atgccaggggaaa

SEQ ID NO: 3875 - DNA, 13 bp, Artificial Sequence
  synthetic sequence
aaaactgctcttt

SEQ ID NO: 3876 - DNA, 13 bp, Artificial Sequence
  synthetic sequence
cagaaggagtagg

SEQ ID NO: 3877 - DNA, 13 bp, Artificial Sequence
  synthetic sequence
aatatactgcatt

SEQ ID NO: 3878 - DNA, 13 bp, Artificial Sequence
  synthetic sequence
tgggttttccagt

SEQ ID NO: 3879 - DNA, 13 bp, Artificial Sequence
  synthetic sequence
ctcagtcattaca

SEQ ID NO: 3880 - DNA, 13 bp, Artificial Sequence
  synthetic sequence
ccagtaagacctc

SEQ ID NO: 3881 - DNA, 13 bp, Artificial Sequence
  synthetic sequence
ttaagacaaagaa

SEQ ID NO: 3882 - DNA, 13 bp, Artificial Sequence
  synthetic sequence
aaaagaaaataga

SEQ ID NO: 3883 - DNA, 13 bp, Artificial Sequence
  synthetic sequence
gctggaaatgtgg

SEQ ID NO: 3884 - DNA, 13 bp, Artificial Sequence
  synthetic sequence
caggagaaaaaga

SEQ ID NO: 3885 - DNA, 13 bp, Artificial Sequence
  synthetic sequence
aaggggttgaagc

SEQ ID NO: 3886 - DNA, 13 bp, Artificial Sequence
  synthetic sequence
cagacccttaccc

SEQ ID NO: 3887 - DNA, 13 bp, Artificial Sequence
  synthetic sequence
tatatcaggatga

SEQ ID NO: 3888 - DNA, 13 bp, Artificial Sequence
  synthetic sequence
tatgcaacagtct

SEQ ID NO: 3889 - DNA, 13 bp, Artificial Sequence
  synthetic sequence
caggaaaagaatg

SEQ ID NO: 3890 - DNA, 13 bp, Artificial Sequence
  synthetic sequence
ctcctgctccagc

SEQ ID NO: 3891 - DNA, 13 bp, Artificial Sequence
  synthetic sequence
tttattatggggt

SEQ ID NO: 3892 - DNA, 13 bp, Artificial Sequence
  synthetic sequence
taataaactgtaa

SEQ ID NO: 3893 - DNA, 13 bp, Artificial Sequence
  synthetic sequence
agaagagatgatg

SEQ ID NO: 3894 - DNA, 13 bp, Artificial Sequence
  synthetic sequence
gcagtgcaaatgg

SEQ ID NO: 3895 - DNA, 13 bp, Artificial Sequence
  synthetic sequence
tgggaatttgtca

SEQ ID NO: 3896 - DNA, 13 bp, Artificial Sequence
  synthetic sequence
tcaggggactaca

SEQ ID NO: 3897 - DNA, 13 bp, Artificial Sequence
  synthetic sequence
agaataagacaaa

SEQ ID NO: 3898 - DNA, 13 bp, Artificial Sequence
  synthetic sequence
gtaaggtcatgga

SEQ ID NO: 3899 - DNA, 13 bp, Artificial Sequence
  synthetic sequence
agacattcagacc

SEQ ID NO: 3900 - DNA, 13 bp, Artificial Sequence
  synthetic sequence
aattcttttattg

SEQ ID NO: 3901 - DNA, 13 bp, Artificial Sequence
  synthetic sequence
tgcacctggagta

SEQ ID NO: 3902 - DNA, 13 bp, Artificial Sequence
  synthetic sequence
cacccctgcctag

SEQ ID NO: 3903 - DNA, 13 bp, Artificial Sequence
  synthetic sequence
aagggactgagac

SEQ ID NO: 3904 - DNA, 13 bp, Artificial Sequence
  synthetic sequence
aggaacagaagaa

SEQ ID NO: 3905 - DNA, 13 bp, Artificial Sequence
  synthetic sequence
aggcacattgtaa

SEQ ID NO: 3906 - DNA, 13 bp, Artificial Sequence
  synthetic sequence
gacttggactgtg

SEQ ID NO: 3907 - DNA, 13 bp, Artificial Sequence
  synthetic sequence
tgggaatttgtta

SEQ ID NO: 3908 - DNA, 13 bp, Artificial Sequence
  synthetic sequence
attgggccagtca

SEQ ID NO: 3909 - DNA, 13 bp, Artificial Sequence
  synthetic sequence
tgtaatgataaga

SEQ ID NO: 3910 - DNA, 13 bp, Artificial Sequence
  synthetic sequence
agccacctttgcc

SEQ ID NO: 3911 - DNA, 13 bp, Artificial Sequence
  synthetic sequence
catgagaaatatc

SEQ ID NO: 3912 - DNA, 13 bp, Artificial Sequence
  synthetic sequence
aacaatgctaaaa

SEQ ID NO: 3913 - DNA, 13 bp, Artificial Sequence
  synthetic sequence
tacttacagaatc

SEQ ID NO: 3914 - DNA, 13 bp, Artificial Sequence
  synthetic sequence
acaggatcagagg

SEQ ID NO: 3915 - DNA, 13 bp, Artificial Sequence
  synthetic sequence
ggacaccaggcag

SEQ ID NO: 3916 - DNA, 13 bp, Artificial Sequence
  synthetic sequence
aactgcttgcaat

SEQ ID NO: 3917 - DNA, 13 bp, Artificial Sequence
  synthetic sequence
aacaatgccaaaa

SEQ ID NO: 3918 - DNA, 13 bp, Artificial Sequence
  synthetic sequence
tcctccagcagca

SEQ ID NO: 3919 - DNA, 13 bp, Artificial Sequence
  synthetic sequence
actcacctttatc

SEQ ID NO: 3920 - DNA, 13 bp, Artificial Sequence
  synthetic sequence
agcgaggattgtg

SEQ ID NO: 3921 - DNA, 13 bp, Artificial Sequence
  synthetic sequence
ttgaaaaatcgca

SEQ ID NO: 3922 - DNA, 13 bp, Artificial Sequence
  synthetic sequence
atatgttgactca

SEQ ID NO: 3923 - DNA, 13 bp, Artificial Sequence
  synthetic sequence
taggggacataag

SEQ ID NO: 3924 - DNA, 13 bp, Artificial Sequence
  synthetic sequence
actcacctgtgtc

SEQ ID NO: 3925 - DNA, 13 bp, Artificial Sequence
  synthetic sequence
gatctgacttaga

SEQ ID NO: 3926 - DNA, 13 bp, Artificial Sequence
  synthetic sequence
agatttacccagg

SEQ ID NO: 3927 - DNA, 13 bp, Artificial Sequence
  synthetic sequence
agcgaggactgtg

SEQ ID NO: 3928 - DNA, 13 bp, Artificial Sequence
  synthetic sequence
ttgcaatacctca

SEQ ID NO: 3929 - DNA, 13 bp, Artificial Sequence
  synthetic sequence
caacagctccacc

SEQ ID NO: 3930 - DNA, 13 bp, Artificial Sequence
  synthetic sequence
caaaaccaacaag

SEQ ID NO: 3931 - DNA, 13 bp, Artificial Sequence
  synthetic sequence
ggccagggggaaa

SEQ ID NO: 3932 - DNA, 13 bp, Artificial Sequence
  synthetic sequence
tagaacaaatgca

SEQ ID NO: 3933 - DNA, 13 bp, Artificial Sequence
  synthetic sequence
atgaaagatatca

SEQ ID NO: 3934 - DNA, 13 bp, Artificial Sequence
  synthetic sequence
tgctattgtaaag

SEQ ID NO: 3935 - DNA, 13 bp, Artificial Sequence
  synthetic sequence
tcactatacctag

SEQ ID NO: 3936 - DNA, 13 bp, Artificial Sequence
  synthetic sequence
ggacatcaggcag

SEQ ID NO: 3937 - DNA, 13 bp, Artificial Sequence
  synthetic sequence
aaccagcaagaaa

SEQ ID NO: 3938 - DNA, 13 bp, Artificial Sequence
  synthetic sequence
gagatattcagac

SEQ ID NO: 3939 - DNA, 13 bp, Artificial Sequence
  synthetic sequence
ataaaaccaaaaa

SEQ ID NO: 3940 - DNA, 13 bp, Artificial Sequence
  synthetic sequence
aataaataggtta

SEQ ID NO: 3941 - DNA, 13 bp, Artificial Sequence
  synthetic sequence
taagacaaacccc

SEQ ID NO: 3942 - DNA, 13 bp, Artificial Sequence
  synthetic sequence
caggagttgaagc

SEQ ID NO: 3943 - DNA, 13 bp, Artificial Sequence
  synthetic sequence
cagcaggaagcac

SEQ ID NO: 3944 - DNA, 13 bp, Artificial Sequence
  synthetic sequence
tgataaattgtaa

SEQ ID NO: 3945 - DNA, 13 bp, Artificial Sequence
  synthetic sequence
ggagaaataaaaa

SEQ ID NO: 3946 - DNA, 13 bp, Artificial Sequence
  synthetic sequence
atggagagttctt

SEQ ID NO: 3947 - DNA, 13 bp, Artificial Sequence
  synthetic sequence
attgtaatgcaca

SEQ ID NO: 3948 - DNA, 13 bp, Artificial Sequence
  synthetic sequence
tagtgaccctaaa

SEQ ID NO: 3949 - DNA, 13 bp, Artificial Sequence
  synthetic sequence
cacccatgttgct

SEQ ID NO: 3950 - DNA, 13 bp, Artificial Sequence
  synthetic sequence
tggacatatcaga

SEQ ID NO: 3951 - DNA, 13 bp, Artificial Sequence
  synthetic sequence
ggggaaaattaga

SEQ ID NO: 3952 - DNA, 13 bp, Artificial Sequence
  synthetic sequence
aaaattgctcttt

SEQ ID NO: 3953 - DNA, 13 bp, Artificial Sequence
  synthetic sequence
gaaacaggacaag

SEQ ID NO: 3954 - DNA, 13 bp, Artificial Sequence
  synthetic sequence
catataacactcc

SEQ ID NO: 3955 - DNA, 13 bp, Artificial Sequence
  synthetic sequence
cccttcagacagg

SEQ ID NO: 3956 - DNA, 13 bp, Artificial Sequence
  synthetic sequence
taatagtgcacct

SEQ ID NO: 3957 - DNA, 13 bp, Artificial Sequence
  synthetic sequence
atgcagaataaaa

SEQ ID NO: 3958 - DNA, 13 bp, Artificial Sequence
  synthetic sequence
tcaaaacagtaag

SEQ ID NO: 3959 - DNA, 13 bp, Artificial Sequence
  synthetic sequence
aagcatattgtaa

SEQ ID NO: 3960 - DNA, 13 bp, Artificial Sequence
  synthetic sequence
caggagtggaagc

SEQ ID NO: 3961 - DNA, 13 bp, Artificial Sequence
  synthetic sequence
tatgggcaagcag

SEQ ID NO: 3962 - DNA, 13 bp, Artificial Sequence
  synthetic sequence
ctgaaccagcagc

SEQ ID NO: 3963 - DNA, 13 bp, Artificial Sequence
  synthetic sequence
ccccaccagcaga

SEQ ID NO: 3964 - DNA, 13 bp, Artificial Sequence
  synthetic sequence
aataagacattca

SEQ ID NO: 3965 - DNA, 13 bp, Artificial Sequence
  synthetic sequence
cagacccctaccc

SEQ ID NO: 3966 - DNA, 13 bp, Artificial Sequence
  synthetic sequence
cagatgcatgaag

SEQ ID NO: 3967 - DNA, 13 bp, Artificial Sequence
  synthetic sequence
ccctccagcagca

SEQ ID NO: 3968 - DNA, 13 bp, Artificial Sequence
  synthetic sequence
aactgcttgtagc

SEQ ID NO: 3969 - DNA, 13 bp, Artificial Sequence
  synthetic sequence
gagccaacagccc

SEQ ID NO: 3970 - DNA, 13 bp, Artificial Sequence
  synthetic sequence
gataaaacaaatt

SEQ ID NO: 3971 - DNA, 13 bp, Artificial Sequence
  synthetic sequence
ggaggagacatga

SEQ ID NO: 3972 - DNA, 13 bp, Artificial Sequence
  synthetic sequence
aagcatattgtga

SEQ ID NO: 3973 - DNA, 13 bp, Artificial Sequence
  synthetic sequence
ttacaacacatag

SEQ ID NO: 3974 - DNA, 13 bp, Artificial Sequence
  synthetic sequence
aatagataggtta

SEQ ID NO: 3975 - DNA, 13 bp, Artificial Sequence
  synthetic sequence
gtgggctttccag

SEQ ID NO: 3976 - DNA, 13 bp, Artificial Sequence
  synthetic sequence
agaagttattcca

SEQ ID NO: 3977 - DNA, 13 bp, Artificial Sequence
  synthetic sequence
ttgaagaatcaca

SEQ ID NO: 3978 - DNA, 13 bp, Artificial Sequence
  synthetic sequence
aaatccagcagga

SEQ ID NO: 3979 - DNA, 13 bp, Artificial Sequence
  synthetic sequence
agatacctacagg

SEQ ID NO: 3980 - DNA, 13 bp, Artificial Sequence
  synthetic sequence
ggtcacagtctat

SEQ ID NO: 3981 - DNA, 13 bp, Artificial Sequence
  synthetic sequence
cctgttaatatta

SEQ ID NO: 3982 - DNA, 13 bp, Artificial Sequence
  synthetic sequence
ggacaacatatct

SEQ ID NO: 3983 - DNA, 13 bp, Artificial Sequence
  synthetic sequence
aagttgtaacacc

SEQ ID NO: 3984 - DNA, 13 bp, Artificial Sequence
  synthetic sequence
cactaaaagcatt

SEQ ID NO: 3985 - DNA, 13 bp, Artificial Sequence
  synthetic sequence
tttggcagcgacc

SEQ ID NO: 3986 - DNA, 13 bp, Artificial Sequence
  synthetic sequence
caaacccagcagg

SEQ ID NO: 3987 - DNA, 13 bp, Artificial Sequence
  synthetic sequence
actccttgtacca

SEQ ID NO: 3988 - DNA, 13 bp, Artificial Sequence
  synthetic sequence
tcctgcagcagca

SEQ ID NO: 3989 - DNA, 13 bp, Artificial Sequence
  synthetic sequence
aattgggcgagtc

SEQ ID NO: 3990 - DNA, 13 bp, Artificial Sequence
  synthetic sequence
gacaatgctaaaa

SEQ ID NO: 3991 - DNA, 13 bp, Artificial Sequence
  synthetic sequence
acaggaacagagg

SEQ ID NO: 3992 - DNA, 13 bp, Artificial Sequence
  synthetic sequence
aatcatcaagatc

SEQ ID NO: 3993 - DNA, 13 bp, Artificial Sequence
  synthetic sequence
acatagtgacaga

SEQ ID NO: 3994 - DNA, 13 bp, Artificial Sequence
  synthetic sequence
gataaagcaaatt

SEQ ID NO: 3995 - DNA, 13 bp, Artificial Sequence
  synthetic sequence
ggcatcaagcagc

SEQ ID NO: 3996 - DNA, 13 bp, Artificial Sequence
  synthetic sequence
attgagagaataa

SEQ ID NO: 3997 - DNA, 13 bp, Artificial Sequence
  synthetic sequence
ctatagtgcaaaa

SEQ ID NO: 3998 - DNA, 13 bp, Artificial Sequence
  synthetic sequence
atctgacagacaa

SEQ ID NO: 3999 - DNA, 13 bp, Artificial Sequence
  synthetic sequence
ctcctcaagacag

SEQ ID NO: 4000 - DNA, 13 bp, Artificial Sequence
  synthetic sequence
agaataagacaag

SEQ ID NO: 4001 - DNA, 13 bp, Artificial Sequence
  synthetic sequence
tatagactaataa

SEQ ID NO: 4002 - DNA, 13 bp, Artificial Sequence
  synthetic sequence
gtaggttttccag

SEQ ID NO: 4003 - DNA, 13 bp, Artificial Sequence
  synthetic sequence
agagaaagccacc

SEQ ID NO: 4004 - DNA, 13 bp, Artificial Sequence
  synthetic sequence
gtggaacttctgg

SEQ ID NO: 4005 - DNA, 13 bp, Artificial Sequence
  synthetic sequence
tcgttccagaccc

SEQ ID NO: 4006 - DNA, 13 bp, Artificial Sequence
  synthetic sequence
actcggcttgctg

SEQ ID NO: 4007 - DNA, 13 bp, Artificial Sequence
  synthetic sequence
taggaaacataag

SEQ ID NO: 4008 - DNA, 13 bp, Artificial Sequence
  synthetic sequence
ttagataaatggg

SEQ ID NO: 4009 - DNA, 13 bp, Artificial Sequence
  synthetic sequence
ggcacttgggtca

SEQ ID NO: 4010 - DNA, 13 bp, Artificial Sequence
  synthetic sequence
agagggggtggga

SEQ ID NO: 4011 - DNA, 13 bp, Artificial Sequence
  synthetic sequence
ttttaatatgtgg

SEQ ID NO: 4012 - DNA, 13 bp, Artificial Sequence
  synthetic sequence
tcaaaatcctgta

SEQ ID NO: 4013 - DNA, 13 bp, Artificial Sequence
  synthetic sequence
agactttcagacc

SEQ ID NO: 4014 - DNA, 13 bp, Artificial Sequence
  synthetic sequence
aaatcttcagacc

SEQ ID NO: 4015 - DNA, 13 bp, Artificial Sequence
  synthetic sequence
tataggctaataa

SEQ ID NO: 4016 - DNA, 13 bp, Artificial Sequence
  synthetic sequence
taatactagctat

SEQ ID NO: 4017 - DNA, 13 bp, Artificial Sequence
  synthetic sequence
agtatagattaat

SEQ ID NO: 4018 - DNA, 13 bp, Artificial Sequence
  synthetic sequence
tatggggtgcctg

SEQ ID NO: 4019 - DNA, 13 bp, Artificial Sequence
  synthetic sequence
agcagaaggggtg

SEQ ID NO: 4020 - DNA, 13 bp, Artificial Sequence
  synthetic sequence
aatgcacaagggc

SEQ ID NO: 4021 - DNA, 13 bp, Artificial Sequence
  synthetic sequence
gagtatccataga

SEQ ID NO: 4022 - DNA, 13 bp, Artificial Sequence
  synthetic sequence
gatgacttatatg

SEQ ID NO: 4023 - DNA, 13 bp, Artificial Sequence
  synthetic sequence
ggcaggaggtagg

SEQ ID NO: 4024 - DNA, 13 bp, Artificial Sequence
  synthetic sequence
cagcagagggagt

SEQ ID NO: 4025 - DNA, 13 bp, Artificial Sequence
  synthetic sequence
aacagtgtactat

SEQ ID NO: 4026 - DNA, 13 bp, Artificial Sequence
  synthetic sequence
atacaggctaata

SEQ ID NO: 4027 - DNA, 13 bp, Artificial Sequence
  synthetic sequence
caggaaagaaatg

SEQ ID NO: 4028 - DNA, 13 bp, Artificial Sequence
  synthetic sequence
tcacaaataatgc

SEQ ID NO: 4029 - DNA, 13 bp, Artificial Sequence
  synthetic sequence
aacaccaaaaagg

SEQ ID NO: 4030 - DNA, 13 bp, Artificial Sequence
  synthetic sequence
actccttgtacta

SEQ ID NO: 4031 - DNA, 13 bp, Artificial Sequence
  synthetic sequence
agaattagacagg

SEQ ID NO: 4032 - DNA, 13 bp, Artificial Sequence
  synthetic sequence
aggagacataaga

SEQ ID NO: 4033 - DNA, 13 bp, Artificial Sequence
  synthetic sequence
tgcagggccccta

SEQ ID NO: 4034 - DNA, 13 bp, Artificial Sequence
  synthetic sequence
gaactgagccagc

SEQ ID NO: 4035 - DNA, 13 bp, Artificial Sequence
  synthetic sequence
aaagcgaaagtaa

SEQ ID NO: 4036 - DNA, 13 bp, Artificial Sequence
  synthetic sequence
cagaagaaaatag

SEQ ID NO: 4037 - DNA, 13 bp, Artificial Sequence
  synthetic sequence
accccttgtaata

SEQ ID NO: 4038 - DNA, 13 bp, Artificial Sequence
  synthetic sequence
aactcctccagca

SEQ ID NO: 4039 - DNA, 13 bp, Artificial Sequence
  synthetic sequence
gctgaacatctta

SEQ ID NO: 4040 - DNA, 13 bp, Artificial Sequence
  synthetic sequence
tcgttacagaccc

SEQ ID NO: 4041 - DNA, 13 bp, Artificial Sequence
  synthetic sequence
ctgtcaacataat

SEQ ID NO: 4042 - DNA, 13 bp, Artificial Sequence
  synthetic sequence
agcagcaccagga

SEQ ID NO: 4043 - DNA, 13 bp, Artificial Sequence
  synthetic sequence
gtaacacctcagt

SEQ ID NO: 4044 - DNA, 13 bp, Artificial Sequence
  synthetic sequence
tattacagagaca

SEQ ID NO: 4045 - DNA, 13 bp, Artificial Sequence
  synthetic sequence
ggaattaaagtaa

SEQ ID NO: 4046 - DNA, 13 bp, Artificial Sequence
  synthetic sequence
ataagacaagcac

SEQ ID NO: 4047 - DNA, 13 bp, Artificial Sequence
  synthetic sequence
ttgtaatgtctca

SEQ ID NO: 4048 - DNA, 13 bp, Artificial Sequence
  synthetic sequence
gtaggtttcccag

SEQ ID NO: 4049 - DNA, 13 bp, Artificial Sequence
  synthetic sequence
aactctagtgagt

SEQ ID NO: 4050 - DNA, 13 bp, Artificial Sequence
  synthetic sequence
ctctcaaaacagg

SEQ ID NO: 4051 - DNA, 13 bp, Artificial Sequence
  synthetic sequence
tggagacacctgg

SEQ ID NO: 4052 - DNA, 13 bp, Artificial Sequence
  synthetic sequence
aataaactggtta

SEQ ID NO: 4053 - DNA, 13 bp, Artificial Sequence
  synthetic sequence
gtcagcctaggac

SEQ ID NO: 4054 - DNA, 13 bp, Artificial Sequence
  synthetic sequence
catagtaattgga

SEQ ID NO: 4055 - DNA, 13 bp, Artificial Sequence
  synthetic sequence
gatagacaggtta

SEQ ID NO: 4056 - DNA, 13 bp, Artificial Sequence
  synthetic sequence
cagctataggttg

SEQ ID NO: 4057 - DNA, 13 bp, Artificial Sequence
  synthetic sequence
atctgtatgtagg

SEQ ID NO: 4058 - DNA, 13 bp, Artificial Sequence
  synthetic sequence
gagagcttcgggt

SEQ ID NO: 4059 - DNA, 13 bp, Artificial Sequence
  synthetic sequence
cgaaagtagaacc

SEQ ID NO: 4060 - DNA, 13 bp, Artificial Sequence
  synthetic sequence
atgggtgcgagag

SEQ ID NO: 4061 - DNA, 13 bp, Artificial Sequence
  synthetic sequence
tagagcagatgca

SEQ ID NO: 4062 - DNA, 13 bp, Artificial Sequence
  synthetic sequence
cctcaaatcactc

SEQ ID NO: 4063 - DNA, 13 bp, Artificial Sequence
  synthetic sequence
gaaatacttgaaa

SEQ ID NO: 4064 - DNA, 13 bp, Artificial Sequence
  synthetic sequence
gagtaggaggacc

SEQ ID NO: 4065 - DNA, 13 bp, Artificial Sequence
  synthetic sequence
atcagcaaatcct

SEQ ID NO: 4066 - DNA, 13 bp, Artificial Sequence
  synthetic sequence
aatatagtgacag

SEQ ID NO: 4067 - DNA, 13 bp, Artificial Sequence
  synthetic sequence
cagacaataccaa

SEQ ID NO: 4068 - DNA, 13 bp, Artificial Sequence
  synthetic sequence
ctaaaactgcttg

SEQ ID NO: 4069 - DNA, 13 bp, Artificial Sequence
  synthetic sequence
agtaaggatgtat

SEQ ID NO: 4070 - DNA, 13 bp, Artificial Sequence
  synthetic sequence
aggaggaaacatg

SEQ ID NO: 4071 - DNA, 13 bp, Artificial Sequence
  synthetic sequence
cctatagtacaga

SEQ ID NO: 4072 - DNA, 13 bp, Artificial Sequence
  synthetic sequence
tgtgctcctgctg

SEQ ID NO: 4073 - DNA, 13 bp, Artificial Sequence
  synthetic sequence
ttctactgtaata

SEQ ID NO: 4074 - DNA, 13 bp, Artificial Sequence
  synthetic sequence
tgaaatgtaatga

SEQ ID NO: 4075 - DNA, 13 bp, Artificial Sequence
  synthetic sequence
aagctgaacacct

SEQ ID NO: 4076 - DNA, 13 bp, Artificial Sequence
  synthetic sequence
tatagattgataa

SEQ ID NO: 4077 - DNA, 13 bp, Artificial Sequence
  synthetic sequence
acatttagaccaa

SEQ ID NO: 4078 - DNA, 13 bp, Artificial Sequence
  synthetic sequence
tctataacactta

SEQ ID NO: 4079 - DNA, 13 bp, Artificial Sequence
  synthetic sequence
agcagtgggttcc

SEQ ID NO: 4080 - DNA, 13 bp, Artificial Sequence
  synthetic sequence
ttcttcctgccat

SEQ ID NO: 4081 - DNA, 13 bp, Artificial Sequence
  synthetic sequence
cattgacagtcca

SEQ ID NO: 4082 - DNA, 13 bp, Artificial Sequence
  synthetic sequence
ccctgcctaactc

SEQ ID NO: 4083 - DNA, 13 bp, Artificial Sequence
  synthetic sequence
tcaggaatccagg

SEQ ID NO: 4084 - DNA, 13 bp, Artificial Sequence
  synthetic sequence
gctattatgtcta

SEQ ID NO: 4085 - DNA, 13 bp, Artificial Sequence
  synthetic sequence
tctgtgggtacac

SEQ ID NO: 4086 - DNA, 13 bp, Artificial Sequence
  synthetic sequence
tctgataatgctg

SEQ ID NO: 4087 - DNA, 13 bp, Artificial Sequence
  synthetic sequence
ttccagggctcta

SEQ ID NO: 4088 - DNA, 13 bp, Artificial Sequence
  synthetic sequence
ttgcctggagctg

SEQ ID NO: 4089 - DNA, 13 bp, Artificial Sequence
  synthetic sequence
accccaatatgtt

SEQ ID NO: 4090 - DNA, 13 bp, Artificial Sequence
  synthetic sequence
cactggctacatg

SEQ ID NO: 4091 - DNA, 13 bp, Artificial Sequence
  synthetic sequence
aaaaatatgcatc

SEQ ID NO: 4092 - DNA, 13 bp, Artificial Sequence
  synthetic sequence
tttgatgggtcat

SEQ ID NO: 4093 - DNA, 13 bp, Artificial Sequence
  synthetic sequence
ggtggtagctgaa

SEQ ID NO: 4094 - DNA, 13 bp, Artificial Sequence
  synthetic sequence
actgtacctatag

SEQ ID NO: 4095 - DNA, 13 bp, Artificial Sequence
  synthetic sequence
tatgtcctgcttg

SEQ ID NO: 4096 - DNA, 13 bp, Artificial Sequence
  synthetic sequence
ttttgaccacttg

SEQ ID NO: 4097 - DNA, 13 bp, Artificial Sequence
  synthetic sequence
cttttcttcttgg

SEQ ID NO: 4098 - DNA, 13 bp, Artificial Sequence
  synthetic sequence
tgtcagcagtctt

SEQ ID NO: 4099 - DNA, 13 bp, Artificial Sequence
  synthetic sequence
tacaatctgggtt

SEQ ID NO: 4100 - DNA, 13 bp, Artificial Sequence
  synthetic sequence
tgtcaaacttcca

SEQ ID NO: 4101 - DNA, 13 bp, Artificial Sequence
  synthetic sequence
atccaggtcatgt

SEQ ID NO: 4102 - DNA, 13 bp, Artificial Sequence
  synthetic sequence
actgggataggtg

SEQ ID NO: 4103 - DNA, 13 bp, Artificial Sequence
  synthetic sequence
gtctaacagcttc

SEQ ID NO: 4104 - DNA, 13 bp, Artificial Sequence
  synthetic sequence
tcccctcctgagg

SEQ ID NO: 4105 - DNA, 13 bp, Artificial Sequence
  synthetic sequence
cttctttgccaca

SEQ ID NO: 4106 - DNA, 13 bp, Artificial Sequence
  synthetic sequence
tatctattccatc

SEQ ID NO: 4107 - DNA, 13 bp, Artificial Sequence
  synthetic sequence
ctgccatttaaca

SEQ ID NO: 4108 - DNA, 13 bp, Artificial Sequence
  synthetic sequence
atgtattgataga

SEQ ID NO: 4109 - DNA, 13 bp, Artificial Sequence
  synthetic sequence
ccagagagctccc

SEQ ID NO: 4110 - DNA, 13 bp, Artificial Sequence
  synthetic sequence
aaattccctggcc

SEQ ID NO: 4111 - DNA, 13 bp, Artificial Sequence
  synthetic sequence
acaactattgcta

SEQ ID NO: 4112 - DNA, 13 bp, Artificial Sequence
  synthetic sequence
atcctgaatcctg

SEQ ID NO: 4113 - DNA, 13 bp, Artificial Sequence
  synthetic sequence
ccatctcttgtta

SEQ ID NO: 4114 - DNA, 13 bp, Artificial Sequence
  synthetic sequence
gtcctggtcctat

SEQ ID NO: 4115 - DNA, 13 bp, Artificial Sequence
  synthetic sequence
ccacagatcaagg

SEQ ID NO: 4116 - DNA, 13 bp, Artificial Sequence
  synthetic sequence
tctgagggatctc

SEQ ID NO: 4117 - DNA, 13 bp, Artificial Sequence
  synthetic sequence
gctgcttatatgc

SEQ ID NO: 4118 - DNA, 13 bp, Artificial Sequence
  synthetic sequence
ataaccctatctg

SEQ ID NO: 4119 - DNA, 13 bp, Artificial Sequence
  synthetic sequence
ataatcctatctg

SEQ ID NO: 4120 - DNA, 13 bp, Artificial Sequence
  synthetic sequence
gtactatatcaag

SEQ ID NO: 4121 - DNA, 13 bp, Artificial Sequence
  synthetic sequence
gcggaaagtccct

SEQ ID NO: 4122 - DNA, 13 bp, Artificial Sequence
  synthetic sequence
tgccacagttgaa

SEQ ID NO: 4123 - DNA, 13 bp, Artificial Sequence
  synthetic sequence
ctaaagggctcta

SEQ ID NO: 4124 - DNA, 13 bp, Artificial Sequence
  synthetic sequence
atcccaaggagca

SEQ ID NO: 4125 - DNA, 13 bp, Artificial Sequence
  synthetic sequence
gtctgacagcttc

SEQ ID NO: 4126 - DNA, 13 bp, Artificial Sequence
  synthetic sequence
ccatctaaaaata

SEQ ID NO: 4127 - DNA, 13 bp, Artificial Sequence
  synthetic sequence
gtcatccatgcta

SEQ ID NO: 4128 - DNA, 13 bp, Artificial Sequence
  synthetic sequence
atttttccttcct

SEQ ID NO: 4129 - DNA, 13 bp, Artificial Sequence
  synthetic sequence
agccttgtgtgtg

SEQ ID NO: 4130 - DNA, 13 bp, Artificial Sequence
  synthetic sequence
ctaccatttaaca

SEQ ID NO: 4131 - DNA, 13 bp, Artificial Sequence
  synthetic sequence
tggttgtagctgt

SEQ ID NO: 4132 - DNA, 13 bp, Artificial Sequence
  synthetic sequence
gaattgcttgtaa

SEQ ID NO: 4133 - DNA, 13 bp, Artificial Sequence
  synthetic sequence
ctttttcttgtat

SEQ ID NO: 4134 - DNA, 13 bp, Artificial Sequence
  synthetic sequence
gaagaggcacagg

SEQ ID NO: 4135 - DNA, 13 bp, Artificial Sequence
  synthetic sequence
gtactacctttat

SEQ ID NO: 4136 - DNA, 13 bp, Artificial Sequence
  synthetic sequence
ctgctaccaggat

SEQ ID NO: 4137 - DNA, 13 bp, Artificial Sequence
  synthetic sequence
ctggattcgcatt

SEQ ID NO: 4138 - DNA, 13 bp, Artificial Sequence
  synthetic sequence
ctggcctcccctt

SEQ ID NO: 4139 - DNA, 13 bp, Artificial Sequence
  synthetic sequence
taattgctaattt

SEQ ID NO: 4140 - DNA, 13 bp, Artificial Sequence
  synthetic sequence
tcaagtttataaa

SEQ ID NO: 4141 - DNA, 13 bp, Artificial Sequence
  synthetic sequence
tccaaaagcctaa

SEQ ID NO: 4142 - DNA, 13 bp, Artificial Sequence
  synthetic sequence
tagccactcccca

SEQ ID NO: 4143 - DNA, 13 bp, Artificial Sequence
  synthetic sequence
ttaatgccccaga

SEQ ID NO: 4144 - DNA, 13 bp, Artificial Sequence
  synthetic sequence
gatcctaccttgt

SEQ ID NO: 4145 - DNA, 13 bp, Artificial Sequence
  synthetic sequence
ccacaaatttcta

SEQ ID NO: 4146 - DNA, 13 bp, Artificial Sequence
  synthetic sequence
ctatagtccacac

SEQ ID NO: 4147 - DNA, 13 bp, Artificial Sequence
  synthetic sequence
tgtatttctgcta

SEQ ID NO: 4148 - DNA, 13 bp, Artificial Sequence
  synthetic sequence
agagacccagtac

SEQ ID NO: 4149 - DNA, 13 bp, Artificial Sequence
  synthetic sequence
ctatggtccacac

SEQ ID NO: 4150 - DNA, 13 bp, Artificial Sequence
  synthetic sequence
agtactccggatg

SEQ ID NO: 4151 - DNA, 13 bp, Artificial Sequence
  synthetic sequence
cctgtaatatttg

SEQ ID NO: 4152 - DNA, 13 bp, Artificial Sequence
  synthetic sequence
tcttgtggggtgg

SEQ ID NO: 4153 - DNA, 13 bp, Artificial Sequence
  synthetic sequence
atcaccaacccaa

SEQ ID NO: 4154 - DNA, 13 bp, Artificial Sequence
  synthetic sequence
tagcctccgctag

SEQ ID NO: 4155 - DNA, 13 bp, Artificial Sequence
  synthetic sequence
tctcctcctgagg

SEQ ID NO: 4156 - DNA, 13 bp, Artificial Sequence
  synthetic sequence
ttttgaccatttg

SEQ ID NO: 4157 - DNA, 13 bp, Artificial Sequence
  synthetic sequence
tcaaggatctctt

SEQ ID NO: 4158 - DNA, 13 bp, Artificial Sequence
  synthetic sequence
tgtatgtctgttg

SEQ ID NO: 4159 - DNA, 13 bp, Artificial Sequence
  synthetic sequence
cacaattgaaaca

SEQ ID NO: 4160 - DNA, 13 bp, Artificial Sequence
  synthetic sequence
ggccttcccttgt

SEQ ID NO: 4161 - DNA, 13 bp, Artificial Sequence
  synthetic sequence
gattctactactc

SEQ ID NO: 4162 - DNA, 13 bp, Artificial Sequence
  synthetic sequence
gtggcttgccaat

SEQ ID NO: 4163 - DNA, 13 bp, Artificial Sequence
  synthetic sequence
ctagactgccatt

SEQ ID NO: 4164 - DNA, 13 bp, Artificial Sequence
  synthetic sequence
gtcatccatccta

SEQ ID NO: 4165 - DNA, 13 bp, Artificial Sequence
  synthetic sequence
taggatctactgg

SEQ ID NO: 4166 - DNA, 13 bp, Artificial Sequence
  synthetic sequence
tatctatcccatc

SEQ ID NO: 4167 - DNA, 13 bp, Artificial Sequence
  synthetic sequence
ctggtgtgtagtt

SEQ ID NO: 4168 - DNA, 13 bp, Artificial Sequence
  synthetic sequence
cagctgctgcctg

SEQ ID NO: 4169 - DNA, 13 bp, Artificial Sequence
  synthetic sequence
ggcaagctttatt

SEQ ID NO: 4170 - DNA, 13 bp, Artificial Sequence
  synthetic sequence
tgtaattcagtct

SEQ ID NO: 4171 - DNA, 13 bp, Artificial Sequence
  synthetic sequence
gcatcacccacat

SEQ ID NO: 4172 - DNA, 13 bp, Artificial Sequence
  synthetic sequence
cccctcagctact

SEQ ID NO: 4173 - DNA, 13 bp, Artificial Sequence
  synthetic sequence
tctctctgcacca

SEQ ID NO: 4174 - DNA, 13 bp, Artificial Sequence
  synthetic sequence
aaaaactattctt

SEQ ID NO: 4175 - DNA, 13 bp, Artificial Sequence
  synthetic sequence
tctggatttgcat

SEQ ID NO: 4176 - DNA, 13 bp, Artificial Sequence
  synthetic sequence
cctgtgatatttg

SEQ ID NO: 4177 - DNA, 13 bp, Artificial Sequence
  synthetic sequence
gtgggttggggtc

SEQ ID NO: 4178 - DNA, 13 bp, Artificial Sequence
  synthetic sequence
cagccttctgatg

SEQ ID NO: 4179 - DNA, 13 bp, Artificial Sequence
  synthetic sequence
ccctggtcctata

SEQ ID NO: 4180 - DNA, 13 bp, Artificial Sequence
  synthetic sequence
tctgctgtttcta

SEQ ID NO: 4181 - DNA, 13 bp, Artificial Sequence
  synthetic sequence
agccttgtgtgtt

SEQ ID NO: 4182 - DNA, 13 bp, Artificial Sequence
  synthetic sequence
ccaccactcttct

SEQ ID NO: 4183 - DNA, 13 bp, Artificial Sequence
  synthetic sequence
tggtactacatca

SEQ ID NO: 4184 - DNA, 13 bp, Artificial Sequence
  synthetic sequence
gttttctaaaagg

SEQ ID NO: 4185 - DNA, 13 bp, Artificial Sequence
  synthetic sequence
cataatccctaat

SEQ ID NO: 4186 - DNA, 13 bp, Artificial Sequence
  synthetic sequence
gtgcaatttaaag

SEQ ID NO: 4187 - DNA, 13 bp, Artificial Sequence
  synthetic sequence
ctgtcaaatctcc

SEQ ID NO: 4188 - DNA, 13 bp, Artificial Sequence
  synthetic sequence
tctaggtcccctc

SEQ ID NO: 4189 - DNA, 13 bp, Artificial Sequence
  synthetic sequence
tctgttccttcag

SEQ ID NO: 4190 - DNA, 13 bp, Artificial Sequence
  synthetic sequence
ctagtgggatgtg

SEQ ID NO: 4191 - DNA, 13 bp, Artificial Sequence
  synthetic sequence
gcctaggaaaatg

SEQ ID NO: 4192 - DNA, 13 bp, Artificial Sequence
  synthetic sequence
tcagcagtctttg

SEQ ID NO: 4193 - DNA, 13 bp, Artificial Sequence
  synthetic sequence
gtaactcagtctt

SEQ ID NO: 4194 - DNA, 13 bp, Artificial Sequence
  synthetic sequence
gatcctaccttat

SEQ ID NO: 4195 - DNA, 13 bp, Artificial Sequence
  synthetic sequence
attccaaggagca

SEQ ID NO: 4196 - DNA, 13 bp, Artificial Sequence
  synthetic sequence
cccactgcatcca

SEQ ID NO: 4197 - DNA, 13 bp, Artificial Sequence
  synthetic sequence
gtacaatttaaag

SEQ ID NO: 4198 - DNA, 13 bp, Artificial Sequence
  synthetic sequence
ctggaaagtcccc

SEQ ID NO: 4199 - DNA, 13 bp, Artificial Sequence
  synthetic sequence
tggaaggccaaat

SEQ ID NO: 4200 - DNA, 13 bp, Artificial Sequence
  synthetic sequence
caatatgttttta

SEQ ID NO: 4201 - DNA, 13 bp, Artificial Sequence
  synthetic sequence
cctgaatcttgca

SEQ ID NO: 4202 - DNA, 13 bp, Artificial Sequence
  synthetic sequence
aaaagtgcatatt

SEQ ID NO: 4203 - DNA, 13 bp, Artificial Sequence
  synthetic sequence
catcccccacatc

SEQ ID NO: 4204 - DNA, 13 bp, Artificial Sequence
  synthetic sequence
ttaaaaagtggct

SEQ ID NO: 4205 - DNA, 13 bp, Artificial Sequence
  synthetic sequence
tctgggtcccctc

SEQ ID NO: 4206 - DNA, 13 bp, Artificial Sequence
  synthetic sequence
atgcttttaaaat

SEQ ID NO: 4207 - DNA, 13 bp, Artificial Sequence
  synthetic sequence
caatttttgaaat

SEQ ID NO: 4208 - DNA, 13 bp, Artificial Sequence
  synthetic sequence
ttctttcccttac

SEQ ID NO: 4209 - DNA, 13 bp, Artificial Sequence
  synthetic sequence
ggagtgtgatagt

SEQ ID NO: 4210 - DNA, 13 bp, Artificial Sequence
  synthetic sequence
gtgattgctccat

SEQ ID NO: 4211 - DNA, 13 bp, Artificial Sequence
  synthetic sequence
ttcagatctaatt

SEQ ID NO: 4212 - DNA, 13 bp, Artificial Sequence
  synthetic sequence
tttctcccactgg

SEQ ID NO: 4213 - DNA, 13 bp, Artificial Sequence
  synthetic sequence
ttctgtgtcagca

SEQ ID NO: 4214 - DNA, 13 bp, Artificial Sequence
  synthetic sequence
ccttgtttctgta

SEQ ID NO: 4215 - DNA, 13 bp, Artificial Sequence
  synthetic sequence
ccacagatttcta

SEQ ID NO: 4216 - DNA, 13 bp, Artificial Sequence
  synthetic sequence
ggagtgtgatatt

SEQ ID NO: 4217 - DNA, 13 bp, Artificial Sequence
  synthetic sequence
ggaagtatgatag

SEQ ID NO: 4218 - DNA, 13 bp, Artificial Sequence
  synthetic sequence
ctatttctggatt

SEQ ID NO: 4219 - DNA, 13 bp, Artificial Sequence
  synthetic sequence
ctctatctgtcca

SEQ ID NO: 4220 - DNA, 13 bp, Artificial Sequence
  synthetic sequence
ccttgtgtattat

SEQ ID NO: 4221 - DNA, 13 bp, Artificial Sequence
  synthetic sequence
tctttatcccatt

SEQ ID NO: 4222 - DNA, 13 bp, Artificial Sequence
  synthetic sequence
gtgcctttttctt

SEQ ID NO: 4223 - DNA, 13 bp, Artificial Sequence
  synthetic sequence
cggctcctgcttc

SEQ ID NO: 4224 - DNA, 13 bp, Artificial Sequence
  synthetic sequence
caagtctataaaa

SEQ ID NO: 4225 - DNA, 13 bp, Artificial Sequence
  synthetic sequence
aaaaatatgcgtc

SEQ ID NO: 4226 - DNA, 13 bp, Artificial Sequence
  synthetic sequence
acaattattgcta

SEQ ID NO: 4227 - DNA, 13 bp, Artificial Sequence
  synthetic sequence
ggagtgtgattgt

SEQ ID NO: 4228 - DNA, 13 bp, Artificial Sequence
  synthetic sequence
aggcggctgtcaa

SEQ ID NO: 4229 - DNA, 13 bp, Artificial Sequence
  synthetic sequence
actttcctgattc

SEQ ID NO: 4230 - DNA, 13 bp, Artificial Sequence
  synthetic sequence
tcccactccatcc

SEQ ID NO: 4231 - DNA, 13 bp, Artificial Sequence
  synthetic sequence
ccccagactgtga

SEQ ID NO: 4232 - DNA, 13 bp, Artificial Sequence
  synthetic sequence
aaagtgacacaga

SEQ ID NO: 4233 - DNA, 13 bp, Artificial Sequence
  synthetic sequence
ctatctgttccct

SEQ ID NO: 4234 - DNA, 13 bp, Artificial Sequence
  synthetic sequence
aggctgctgtcaa

SEQ ID NO: 4235 - DNA, 13 bp, Artificial Sequence
  synthetic sequence
cctgtaatgtttg

SEQ ID NO: 4236 - DNA, 13 bp, Artificial Sequence
  synthetic sequence
ccatctccacaag

SEQ ID NO: 4237 - DNA, 13 bp, Artificial Sequence
  synthetic sequence
ttggtactacttt

SEQ ID NO: 4238 - DNA, 13 bp, Artificial Sequence
  synthetic sequence
tgttgcataaaat

SEQ ID NO: 4239 - DNA, 13 bp, Artificial Sequence
  synthetic sequence
ttgttttgttctt

SEQ ID NO: 4240 - DNA, 13 bp, Artificial Sequence
  synthetic sequence
ttgttgacatcct

SEQ ID NO: 4241 - DNA, 13 bp, Artificial Sequence
  synthetic sequence
tcaagcttataaa

SEQ ID NO: 4242 - DNA, 13 bp, Artificial Sequence
  synthetic sequence
ggagagttatagt

SEQ ID NO: 4243 - DNA, 13 bp, Artificial Sequence
  synthetic sequence
ccccatctccata

SEQ ID NO: 4244 - DNA, 13 bp, Artificial Sequence
  synthetic sequence
agcaaaaattatt

SEQ ID NO: 4245 - DNA, 13 bp, Artificial Sequence
  synthetic sequence
ccaggcacaatca

SEQ ID NO: 4246 - DNA, 13 bp, Artificial Sequence
  synthetic sequence
ctaggaaagtgtc

SEQ ID NO: 4247 - DNA, 13 bp, Artificial Sequence
  synthetic sequence
tccggatgtagct

SEQ ID NO: 4248 - DNA, 13 bp, Artificial Sequence
  synthetic sequence
cctgccaatactc

SEQ ID NO: 4249 - DNA, 13 bp, Artificial Sequence
  synthetic sequence
ttattcatagatt

SEQ ID NO: 4250 - DNA, 13 bp, Artificial Sequence
  synthetic sequence
ggtctgctctgaa

SEQ ID NO: 4251 - DNA, 13 bp, Artificial Sequence
  synthetic sequence
aaagattattgtt

SEQ ID NO: 4252 - DNA, 13 bp, Artificial Sequence
  synthetic sequence
ctgggttcgcatt

SEQ ID NO: 4253 - DNA, 13 bp, Artificial Sequence
  synthetic sequence
ccctgtttctgta

SEQ ID NO: 4254 - DNA, 13 bp, Artificial Sequence
  synthetic sequence
tgtatgggaattg

SEQ ID NO: 4255 - DNA, 13 bp, Artificial Sequence
  synthetic sequence
gtaagtctctcaa

SEQ ID NO: 4256 - DNA, 13 bp, Artificial Sequence
  synthetic sequence
ggatggttccagg

SEQ ID NO: 4257 - DNA, 13 bp, Artificial Sequence
  synthetic sequence
agacgggcacaca

SEQ ID NO: 4258 - DNA, 13 bp, Artificial Sequence
  synthetic sequence
tcttgtcttttct

SEQ ID NO: 4259 - DNA, 13 bp, Artificial Sequence
  synthetic sequence
tatgtcctgctgg

SEQ ID NO: 4260 - DNA, 13 bp, Artificial Sequence
  synthetic sequence
cttccttgccaca

SEQ ID NO: 4261 - DNA, 13 bp, Artificial Sequence
  synthetic sequence
atgaagtctctca

SEQ ID NO: 4262 - DNA, 13 bp, Artificial Sequence
  synthetic sequence
ccactgctctttt

SEQ ID NO: 4263 - DNA, 13 bp, Artificial Sequence
  synthetic sequence
tatggctgctatg

SEQ ID NO: 4264 - DNA, 13 bp, Artificial Sequence
  synthetic sequence
ctgctcctactcc

SEQ ID NO: 4265 - DNA, 13 bp, Artificial Sequence
  synthetic sequence
tggtactatatca

SEQ ID NO: 4266 - DNA, 13 bp, Artificial Sequence
  synthetic sequence
ggatacagttcct

SEQ ID NO: 4267 - DNA, 13 bp, Artificial Sequence
  synthetic sequence
ctattattctttc

SEQ ID NO: 4268 - DNA, 13 bp, Artificial Sequence
  synthetic sequence
tcttcttctgcta

SEQ ID NO: 4269 - DNA, 13 bp, Artificial Sequence
  synthetic sequence
tcctgcaaagcta

SEQ ID NO: 4270 - DNA, 13 bp, Artificial Sequence
  synthetic sequence
ggccatccaacta

SEQ ID NO: 4271 - DNA, 13 bp, Artificial Sequence
  synthetic sequence
tgtgtcttttgct

SEQ ID NO: 4272 - DNA, 13 bp, Artificial Sequence
  synthetic sequence
ataccttttcttg

SEQ ID NO: 4273 - DNA, 13 bp, Artificial Sequence
  synthetic sequence
taggaaaatgtct

SEQ ID NO: 4274 - DNA, 13 bp, Artificial Sequence
  synthetic sequence
tgccaatcaggga

SEQ ID NO: 4275 - DNA, 13 bp, Artificial Sequence
  synthetic sequence
ggagtgtgatgtt

SEQ ID NO: 4276 - DNA, 13 bp, Artificial Sequence
  synthetic sequence
ctgttaaatctcc

SEQ ID NO: 4277 - DNA, 13 bp, Artificial Sequence
  synthetic sequence
aatagtagtcctg

SEQ ID NO: 4278 - DNA, 13 bp, Artificial Sequence
  synthetic sequence
tcagcagttcttg

SEQ ID NO: 4279 - DNA, 13 bp, Artificial Sequence
  synthetic sequence
ggagtgtgatggt

SEQ ID NO: 4280 - DNA, 13 bp, Artificial Sequence
  synthetic sequence
gtcacattttcca

SEQ ID NO: 4281 - DNA, 13 bp, Artificial Sequence
  synthetic sequence
ccatttccacaag

SEQ ID NO: 4282 - DNA, 13 bp, Artificial Sequence
  synthetic sequence
tcagcagtccttg

SEQ ID NO: 4283 - DNA, 13 bp, Artificial Sequence
  synthetic sequence
tagatctcctcct

SEQ ID NO: 4284 - DNA, 13 bp, Artificial Sequence
  synthetic sequence
atgtctcccactg

SEQ ID NO: 4285 - DNA, 13 bp, Artificial Sequence
  synthetic sequence
ctacaatttaaag

SEQ ID NO: 4286 - DNA, 13 bp, Artificial Sequence
  synthetic sequence
tgatagtgtcatt

SEQ ID NO: 4287 - DNA, 13 bp, Artificial Sequence
  synthetic sequence
actgtccctatag

SEQ ID NO: 4288 - DNA, 13 bp, Artificial Sequence
  synthetic sequence
cactagctacatg

SEQ ID NO: 4289 - DNA, 13 bp, Artificial Sequence
  synthetic sequence
acttgttcttgta

SEQ ID NO: 4290 - DNA, 13 bp, Artificial Sequence
  synthetic sequence
attaatatcccca

SEQ ID NO: 4291 - DNA, 13 bp, Artificial Sequence
  synthetic sequence
gtcctatttctat

SEQ ID NO: 4292 - DNA, 13 bp, Artificial Sequence
  synthetic sequence
cttccttttccat

SEQ ID NO: 4293 - DNA, 13 bp, Artificial Sequence
  synthetic sequence
tctgctcctgctt

SEQ ID NO: 4294 - DNA, 13 bp, Artificial Sequence
  synthetic sequence
gagctcccaggct

SEQ ID NO: 4295 - DNA, 13 bp, Artificial Sequence
  synthetic sequence
cctaatgggatgt

SEQ ID NO: 4296 - DNA, 13 bp, Artificial Sequence
  synthetic sequence
acttcttcttgta

SEQ ID NO: 4297 - DNA, 13 bp, Artificial Sequence
  synthetic sequence
ctagggaaatgtc

SEQ ID NO: 4298 - DNA, 13 bp, Artificial Sequence
  synthetic sequence
catggtgtttaaa

SEQ ID NO: 4299 - DNA, 13 bp, Artificial Sequence
  synthetic sequence
tatgtctggattt

SEQ ID NO: 4300 - DNA, 13 bp, Artificial Sequence
  synthetic sequence
ccaactgctcttt

SEQ ID NO: 4301 - DNA, 13 bp, Artificial Sequence
  synthetic sequence
gcacacactgctt

SEQ ID NO: 4302 - DNA, 13 bp, Artificial Sequence
  synthetic sequence
ttatttgtttaca

SEQ ID NO: 4303 - DNA, 13 bp, Artificial Sequence
  synthetic sequence
ctaacttctgtat

SEQ ID NO: 4304 - DNA, 13 bp, Artificial Sequence
  synthetic sequence
ccccggaaagtcc

SEQ ID NO: 4305 - DNA, 13 bp, Artificial Sequence
  synthetic sequence
taattgtcaattt

SEQ ID NO: 4306 - DNA, 13 bp, Artificial Sequence
  synthetic sequence
ggcctccccttgt

SEQ ID NO: 4307 - DNA, 13 bp, Artificial Sequence
  synthetic sequence
ggagagttatatt

SEQ ID NO: 4308 - DNA, 13 bp, Artificial Sequence
  synthetic sequence
cagcatctgaggg

SEQ ID NO: 4309 - DNA, 13 bp, Artificial Sequence
  synthetic sequence
aggccatcccact

SEQ ID NO: 4310 - DNA, 13 bp, Artificial Sequence
  synthetic sequence
tatccaccattgt

SEQ ID NO: 4311 - DNA, 13 bp, Artificial Sequence
  synthetic sequence
ttatctatgccat

SEQ ID NO: 4312 - DNA, 13 bp, Artificial Sequence
  synthetic sequence
gtataggaattgg

SEQ ID NO: 4313 - DNA, 13 bp, Artificial Sequence
  synthetic sequence
ttctttcccttat

SEQ ID NO: 4314 - DNA, 13 bp, Artificial Sequence
  synthetic sequence
atttgtctacagc

SEQ ID NO: 4315 - DNA, 13 bp, Artificial Sequence
  synthetic sequence
tttgtactacatc

SEQ ID NO: 4316 - DNA, 13 bp, Artificial Sequence
  synthetic sequence
ttgctcttatttt

SEQ ID NO: 4317 - DNA, 13 bp, Artificial Sequence
  synthetic sequence
aggttaggatcta

SEQ ID NO: 4318 - DNA, 13 bp, Artificial Sequence
  synthetic sequence
ccagagagctctc

SEQ ID NO: 4319 - DNA, 13 bp, Artificial Sequence
  synthetic sequence
ggaactgagaaat

SEQ ID NO: 4320 - DNA, 13 bp, Artificial Sequence
  synthetic sequence
actactccttgac

SEQ ID NO: 4321 - DNA, 13 bp, Artificial Sequence
  synthetic sequence
ccacagttgaaac

SEQ ID NO: 4322 - DNA, 13 bp, Artificial Sequence
  synthetic sequence
agggatcctacct

SEQ ID NO: 4323 - DNA, 13 bp, Artificial Sequence
  synthetic sequence
tgttgcatagaat

SEQ ID NO: 4324 - DNA, 13 bp, Artificial Sequence
  synthetic sequence
cctgcaaggctag

SEQ ID NO: 4325 - DNA, 13 bp, Artificial Sequence
  synthetic sequence
ctttcctccttgg

SEQ ID NO: 4326 - DNA, 13 bp, Artificial Sequence
  synthetic sequence
tgtagagatccta

SEQ ID NO: 4327 - DNA, 13 bp, Artificial Sequence
  synthetic sequence
ttttgctcttcct

SEQ ID NO: 4328 - DNA, 13 bp, Artificial Sequence
  synthetic sequence
tgcaatctgggtt

SEQ ID NO: 4329 - DNA, 13 bp, Artificial Sequence
  synthetic sequence
tatattgatagat

SEQ ID NO: 4330 - DNA, 13 bp, Artificial Sequence
  synthetic sequence
aaaaagtgcatac

SEQ ID NO: 4331 - DNA, 13 bp, Artificial Sequence
  synthetic sequence
ctgtcaaatttcc

SEQ ID NO: 4332 - DNA, 13 bp, Artificial Sequence
  synthetic sequence
caaggatgtcttg

SEQ ID NO: 4333 - DNA, 13 bp, Artificial Sequence
  synthetic sequence
gtacagtttaaag

SEQ ID NO: 4334 - DNA, 13 bp, Artificial Sequence
  synthetic sequence
tatctgtcccttc

SEQ ID NO: 4335 - DNA, 13 bp, Artificial Sequence
  synthetic sequence
ccccaatatgttc

SEQ ID NO: 4336 - DNA, 13 bp, Artificial Sequence
  synthetic sequence
ctctctcccattc

SEQ ID NO: 4337 - DNA, 13 bp, Artificial Sequence
  synthetic sequence
ttccctgtctttc

SEQ ID NO: 4338 - DNA, 13 bp, Artificial Sequence
  synthetic sequence
cacacctcccctg

SEQ ID NO: 4339 - DNA, 13 bp, Artificial Sequence
  synthetic sequence
tgcctaacagctt

SEQ ID NO: 4340 - DNA, 13 bp, Artificial Sequence
  synthetic sequence
ccatctcttgtca

SEQ ID NO: 4341 - DNA, 13 bp, Artificial Sequence
  synthetic sequence
gtattgctacttg

SEQ ID NO: 4342 - DNA, 13 bp, Artificial Sequence
  synthetic sequence
tctcctactggga

SEQ ID NO: 4343 - DNA, 13 bp, Artificial Sequence
  synthetic sequence
ggcactactttta

SEQ ID NO: 4344 - DNA, 13 bp, Artificial Sequence
  synthetic sequence
tgatagtgccatt

SEQ ID NO: 4345 - DNA, 13 bp, Artificial Sequence
  synthetic sequence
caaggatatcttg

SEQ ID NO: 4346 - DNA, 13 bp, Artificial Sequence
  synthetic sequence
ctctccctggtcc

SEQ ID NO: 4347 - DNA, 13 bp, Artificial Sequence
  synthetic sequence
taaaactccggat

SEQ ID NO: 4348 - DNA, 13 bp, Artificial Sequence
  synthetic sequence
acaaatttctgtt

SEQ ID NO: 4349 - DNA, 13 bp, Artificial Sequence
  synthetic sequence
ctgtcaaacctcc

SEQ ID NO: 4350 - DNA, 13 bp, Artificial Sequence
  synthetic sequence
cacaattgaagca

SEQ ID NO: 4351 - DNA, 13 bp, Artificial Sequence
  synthetic sequence
gcggaaagtcccc

SEQ ID NO: 4352 - DNA, 13 bp, Artificial Sequence
  synthetic sequence
ctttgaccacttg

SEQ ID NO: 4353 - DNA, 13 bp, Artificial Sequence
  synthetic sequence
tatagaaaagcgc

SEQ ID NO: 4354 - DNA, 13 bp, Artificial Sequence
  synthetic sequence
ttctgtatatcat

SEQ ID NO: 4355 - DNA, 13 bp, Artificial Sequence
  synthetic sequence
gtggaaagtccct

SEQ ID NO: 4356 - DNA, 13 bp, Artificial Sequence
  synthetic sequence
agccaggcacaag

SEQ ID NO: 4357 - DNA, 13 bp, Artificial Sequence
  synthetic sequence
cctgctgtgtttt

SEQ ID NO: 4358 - DNA, 13 bp, Artificial Sequence
  synthetic sequence
ctactgctctttt

SEQ ID NO: 4359 - DNA, 13 bp, Artificial Sequence
  synthetic sequence
tgtcaaactgcca

SEQ ID NO: 4360 - DNA, 13 bp, Artificial Sequence
  synthetic sequence
aaatttcctggcc

SEQ ID NO: 4361 - DNA, 13 bp, Artificial Sequence
  synthetic sequence
tccccaagtgctg

SEQ ID NO: 4362 - DNA, 13 bp, Artificial Sequence
  synthetic sequence
tctctatcccatt

SEQ ID NO: 4363 - DNA, 13 bp, Artificial Sequence
  synthetic sequence
ctttaatacttct

SEQ ID NO: 4364 - DNA, 13 bp, Artificial Sequence
  synthetic sequence
tgttattactaat

SEQ ID NO: 4365 - DNA, 13 bp, Artificial Sequence
  synthetic sequence
cctgccaatagtc

SEQ ID NO: 4366 - DNA, 13 bp, Artificial Sequence
  synthetic sequence
aaataagcatctc

SEQ ID NO: 4367 - DNA, 13 bp, Artificial Sequence
  synthetic sequence
ctatatatccact

SEQ ID NO: 4368 - DNA, 13 bp, Artificial Sequence
  synthetic sequence
ccctatctgtcca

SEQ ID NO: 4369 - DNA, 13 bp, Artificial Sequence
  synthetic sequence
gtcaaattagcat

SEQ ID NO: 4370 - DNA, 13 bp, Artificial Sequence
  synthetic sequence
tctatatatacta

SEQ ID NO: 4371 - DNA, 13 bp, Artificial Sequence
  synthetic sequence
tcccctcctgagt

SEQ ID NO: 4372 - DNA, 13 bp, Artificial Sequence
  synthetic sequence
gggattgtgatgg

SEQ ID NO: 4373 - DNA, 13 bp, Artificial Sequence
  synthetic sequence
atcagtgcaattt

SEQ ID NO: 4374 - DNA, 13 bp, Artificial Sequence
  synthetic sequence
tccccaagatcat

SEQ ID NO: 4375 - DNA, 13 bp, Artificial Sequence
  synthetic sequence
agttccctggcct

SEQ ID NO: 4376 - DNA, 13 bp, Artificial Sequence
  synthetic sequence
tcaagcctataaa

SEQ ID NO: 4377 - DNA, 13 bp, Artificial Sequence
  synthetic sequence
actgtacctacag

SEQ ID NO: 4378 - DNA, 13 bp, Artificial Sequence
  synthetic sequence
cttctgttgtttc

SEQ ID NO: 4379 - DNA, 13 bp, Artificial Sequence
  synthetic sequence
ttctgagagggag

SEQ ID NO: 4380 - DNA, 13 bp, Artificial Sequence
  synthetic sequence
gttacattttcca

SEQ ID NO: 4381 - DNA, 13 bp, Artificial Sequence
  synthetic sequence
ccctgcttctgta

SEQ ID NO: 4382 - DNA, 13 bp, Artificial Sequence
  synthetic sequence
cttctgctaaact

SEQ ID NO: 4383 - DNA, 13 bp, Artificial Sequence
  synthetic sequence
gggattgtgatgt

SEQ ID NO: 4384 - DNA, 13 bp, Artificial Sequence
  synthetic sequence
atccctgcctaat

SEQ ID NO: 4385 - DNA, 13 bp, Artificial Sequence
  synthetic sequence
tctactggatcca

SEQ ID NO: 4386 - DNA, 13 bp, Artificial Sequence
  synthetic sequence
catatattggtag

SEQ ID NO: 4387 - DNA, 13 bp, Artificial Sequence
  synthetic sequence
attaattcagcct

SEQ ID NO: 4388 - DNA, 13 bp, Artificial Sequence
  synthetic sequence
ccatgtccacaag

SEQ ID NO: 4389 - DNA, 13 bp, Artificial Sequence
  synthetic sequence
ccctacctgacta

SEQ ID NO: 4390 - DNA, 13 bp, Artificial Sequence
  synthetic sequence
tcagtgcagttta

SEQ ID NO: 4391 - DNA, 13 bp, Artificial Sequence
  synthetic sequence
gtattggtagata

SEQ ID NO: 4392 - DNA, 13 bp, Artificial Sequence
  synthetic sequence
ttctatgaatact

SEQ ID NO: 4393 - DNA, 13 bp, Artificial Sequence
  synthetic sequence
ttctgttgtttgt

SEQ ID NO: 4394 - DNA, 13 bp, Artificial Sequence
  synthetic sequence
ccacttgccacat

SEQ ID NO: 4395 - DNA, 13 bp, Artificial Sequence
  synthetic sequence
ttatagtgtcatt

SEQ ID NO: 4396 - DNA, 13 bp, Artificial Sequence
  synthetic sequence
ttggccactcccc

SEQ ID NO: 4397 - DNA, 13 bp, Artificial Sequence
  synthetic sequence
tcctggtcctata

SEQ ID NO: 4398 - DNA, 13 bp, Artificial Sequence
  synthetic sequence
ctacagtttaaag

SEQ ID NO: 4399 - DNA, 13 bp, Artificial Sequence
  synthetic sequence
tgtcagcaatctt

SEQ ID NO: 4400 - DNA, 13 bp, Artificial Sequence
  synthetic sequence
atttttccttctt

SEQ ID NO: 4401 - DNA, 13 bp, Artificial Sequence
  synthetic sequence
ttctttctcttac

SEQ ID NO: 4402 - DNA, 13 bp, Artificial Sequence
  synthetic sequence
ccactggccacat

SEQ ID NO: 4403 - DNA, 13 bp, Artificial Sequence
  synthetic sequence
ctatcaaacttcc

SEQ ID NO: 4404 - DNA, 13 bp, Artificial Sequence
  synthetic sequence
acacagagtgggg

SEQ ID NO: 4405 - DNA, 13 bp, Artificial Sequence
  synthetic sequence
tctattccatcta

SEQ ID NO: 4406 - DNA, 13 bp, Artificial Sequence
  synthetic sequence
tccctgatgctaa

SEQ ID NO: 4407 - DNA, 13 bp, Artificial Sequence
  synthetic sequence
tattcatggattc

SEQ ID NO: 4408 - DNA, 13 bp, Artificial Sequence
  synthetic sequence
tttgtatatcatt

SEQ ID NO: 4409 - DNA, 13 bp, Artificial Sequence
  synthetic sequence
atccttgtgtgtg

SEQ ID NO: 4410 - DNA, 13 bp, Artificial Sequence
  synthetic sequence
tattgtcttatta

SEQ ID NO: 4411 - DNA, 13 bp, Artificial Sequence
  synthetic sequence
agccaggactctt

SEQ ID NO: 4412 - DNA, 13 bp, Artificial Sequence
  synthetic sequence
cctccatcacgtg

SEQ ID NO: 4413 - DNA, 13 bp, Artificial Sequence
  synthetic sequence
atcctaggcaatt

SEQ ID NO: 4414 - DNA, 13 bp, Artificial Sequence
  synthetic sequence
acatataatccca

SEQ ID NO: 4415 - DNA, 13 bp, Artificial Sequence
  synthetic sequence
tttgaaagttgga

SEQ ID NO: 4416 - DNA, 13 bp, Artificial Sequence
  synthetic sequence
ggtgaccatttca

SEQ ID NO: 4417 - DNA, 13 bp, Artificial Sequence
  synthetic sequence
taatcataatcct

SEQ ID NO: 4418 - DNA, 13 bp, Artificial Sequence
  synthetic sequence
aagagctgctggt

SEQ ID NO: 4419 - DNA, 13 bp, Artificial Sequence
  synthetic sequence
ttattgcttcaga

SEQ ID NO: 4420 - DNA, 13 bp, Artificial Sequence
  synthetic sequence
agtgtccttgttg

SEQ ID NO: 4421 - DNA, 13 bp, Artificial Sequence
  synthetic sequence
tcaagatcagata

SEQ ID NO: 4422 - DNA, 13 bp, Artificial Sequence
  synthetic sequence
ttgatgccaacag

SEQ ID NO: 4423 - DNA, 13 bp, Artificial Sequence
  synthetic sequence
ccagttgaattat

SEQ ID NO: 4424 - DNA, 13 bp, Artificial Sequence
  synthetic sequence
acactcacaaaac

SEQ ID NO: 4425 - DNA, 13 bp, Artificial Sequence
  synthetic sequence
agaactcttggca

SEQ ID NO: 4426 - DNA, 13 bp, Artificial Sequence
  synthetic sequence
tcactcatgtagt

SEQ ID NO: 4427 - DNA, 13 bp, Artificial Sequence
  synthetic sequence
gaaacaccaggct

SEQ ID NO: 4428 - DNA, 13 bp, Artificial Sequence
  synthetic sequence
catcataaacatc

SEQ ID NO: 4429 - DNA, 13 bp, Artificial Sequence
  synthetic sequence
tggtttgagaaca

SEQ ID NO: 4430 - DNA, 13 bp, Artificial Sequence
  synthetic sequence
cacatataagaga

SEQ ID NO: 4431 - DNA, 13 bp, Artificial Sequence
  synthetic sequence
ttgactgaatcat

SEQ ID NO: 4432 - DNA, 13 bp, Artificial Sequence
  synthetic sequence
gtaatgatgttgt

SEQ ID NO: 4433 - DNA, 13 bp, Artificial Sequence
  synthetic sequence
aaatcttgatctt

SEQ ID NO: 4434 - DNA, 13 bp, Artificial Sequence
  synthetic sequence
ctagaaattattt

SEQ ID NO: 4435 - DNA, 13 bp, Artificial Sequence
  synthetic sequence
agaaatcttcaag

SEQ ID NO: 4436 - DNA, 13 bp, Artificial Sequence
  synthetic sequence
ctgcatacaagaa

SEQ ID NO: 4437 - DNA, 13 bp, Artificial Sequence
  synthetic sequence
agtcaatctcaat

SEQ ID NO: 4438 - DNA, 13 bp, Artificial Sequence
  synthetic sequence
gtgaccacttcat

SEQ ID NO: 4439 - DNA, 13 bp, Artificial Sequence
  synthetic sequence
gtcctcttctgaa

SEQ ID NO: 4440 - DNA, 13 bp, Artificial Sequence
  synthetic sequence
acaaatggtctca

SEQ ID NO: 4441 - DNA, 13 bp, Artificial Sequence
  synthetic sequence
tgatcactcatat

SEQ ID NO: 4442 - DNA, 13 bp, Artificial Sequence
  synthetic sequence
tgatcaattgttc

SEQ ID NO: 4443 - DNA, 13 bp, Artificial Sequence
  synthetic sequence
acttaaaacactg

SEQ ID NO: 4444 - DNA, 13 bp, Artificial Sequence
  synthetic sequence
atcatctttgtca

SEQ ID NO: 4445 - DNA, 13 bp, Artificial Sequence
  synthetic sequence
aagaaatcttctg

SEQ ID NO: 4446 - DNA, 13 bp, Artificial Sequence
  synthetic sequence
tctataagtggta

SEQ ID NO: 4447 - DNA, 13 bp, Artificial Sequence
  synthetic sequence
gtctccaacagtc

SEQ ID NO: 4448 - DNA, 13 bp, Artificial Sequence
  synthetic sequence
tcatttattgatg

SEQ ID NO: 4449 - DNA, 13 bp, Artificial Sequence
  synthetic sequence
ccttggtggcatg

SEQ ID NO: 4450 - DNA, 13 bp, Artificial Sequence
  synthetic sequence
tcaaagaaatcct

SEQ ID NO: 4451 - DNA, 13 bp, Artificial Sequence
  synthetic sequence
tattcttggtcca

SEQ ID NO: 4452 - DNA, 13 bp, Artificial Sequence
  synthetic sequence
gcatacaaaaatc

SEQ ID NO: 4453 - DNA, 13 bp, Artificial Sequence
  synthetic sequence
tttttgttgactc

SEQ ID NO: 4454 - DNA, 13 bp, Artificial Sequence
  synthetic sequence
agtcctgcttgtt

SEQ ID NO: 4455 - DNA, 13 bp, Artificial Sequence
  synthetic sequence
tgtataacaggtg

SEQ ID NO: 4456 - DNA, 13 bp, Artificial Sequence
  synthetic sequence
ggtgctcactaga

SEQ ID NO: 4457 - DNA, 13 bp, Artificial Sequence
  synthetic sequence
atcacctccatat

SEQ ID NO: 4458 - DNA, 13 bp, Artificial Sequence
  synthetic sequence
agacttaaggttc

SEQ ID NO: 4459 - DNA, 13 bp, Artificial Sequence
  synthetic sequence
cacatgtaggaaa

SEQ ID NO: 4460 - DNA, 13 bp, Artificial Sequence
  synthetic sequence
acttactataaca

SEQ ID NO: 4461 - DNA, 13 bp, Artificial Sequence
  synthetic sequence
attgtggcgactc

SEQ ID NO: 4462 - DNA, 13 bp, Artificial Sequence
  synthetic sequence
cttctttgcatct

SEQ ID NO: 4463 - DNA, 13 bp, Artificial Sequence
  synthetic sequence
gatgcaatggaac

SEQ ID NO: 4464 - DNA, 13 bp, Artificial Sequence
  synthetic sequence
acttctttgaaac

SEQ ID NO: 4465 - DNA, 13 bp, Artificial Sequence
  synthetic sequence
catttgcgttgca

SEQ ID NO: 4466 - DNA, 13 bp, Artificial Sequence
  synthetic sequence
aatgacacatgta

SEQ ID NO: 4467 - DNA, 13 bp, Artificial Sequence
  synthetic sequence
ccccacttgctgt

SEQ ID NO: 4468 - DNA, 13 bp, Artificial Sequence
  synthetic sequence
ctccagcagtctg

SEQ ID NO: 4469 - DNA, 13 bp, Artificial Sequence
  synthetic sequence
ctgccgtctatca

SEQ ID NO: 4470 - DNA, 13 bp, Artificial Sequence
  synthetic sequence
ttgtattcatagt

SEQ ID NO: 4471 - DNA, 13 bp, Artificial Sequence
  synthetic sequence
tactgtagcagag

SEQ ID NO: 4472 - DNA, 13 bp, Artificial Sequence
  synthetic sequence
gattcttgactgt

SEQ ID NO: 4473 - DNA, 13 bp, Artificial Sequence
  synthetic sequence
gacttgaagcact

SEQ ID NO: 4474 - DNA, 13 bp, Artificial Sequence
  synthetic sequence
ttgttattgatgc

SEQ ID NO: 4475 - DNA, 13 bp, Artificial Sequence
  synthetic sequence
gatcctggtcatg

SEQ ID NO: 4476 - DNA, 13 bp, Artificial Sequence
  synthetic sequence
aaggacttctcct

SEQ ID NO: 4477 - DNA, 13 bp, Artificial Sequence
  synthetic sequence
tggtttccctttt

SEQ ID NO: 4478 - DNA, 13 bp, Artificial Sequence
  synthetic sequence
ctcgtaactgtcc

SEQ ID NO: 4479 - DNA, 13 bp, Artificial Sequence
  synthetic sequence
taaagctttgatt

SEQ ID NO: 4480 - DNA, 13 bp, Artificial Sequence
  synthetic sequence
gcgctgttaccat

SEQ ID NO: 4481 - DNA, 13 bp, Artificial Sequence
  synthetic sequence
actctgaaaggca

SEQ ID NO: 4482 - DNA, 13 bp, Artificial Sequence
  synthetic sequence
aattctagaatgg

SEQ ID NO: 4483 - DNA, 13 bp, Artificial Sequence
  synthetic sequence
tctcctgacaagt

SEQ ID NO: 4484 - DNA, 13 bp, Artificial Sequence
  synthetic sequence
aagtattcaaaga

SEQ ID NO: 4485 - DNA, 13 bp, Artificial Sequence
  synthetic sequence
ttcaagcagctca

SEQ ID NO: 4486 - DNA, 13 bp, Artificial Sequence
  synthetic sequence
aagaagacgtcat

SEQ ID NO: 4487 - DNA, 13 bp, Artificial Sequence
  synthetic sequence
tcttgtagtgaca

SEQ ID NO: 4488 - DNA, 13 bp, Artificial Sequence
  synthetic sequence
agcgttacatagt

SEQ ID NO: 4489 - DNA, 13 bp, Artificial Sequence
  synthetic sequence
agaaacttaatcc

SEQ ID NO: 4490 - DNA, 13 bp, Artificial Sequence
  synthetic sequence
agataaggctatg

SEQ ID NO: 4491 - DNA, 13 bp, Artificial Sequence
  synthetic sequence
tttgagcaataat

SEQ ID NO: 4492 - DNA, 13 bp, Artificial Sequence
  synthetic sequence
tagtgaatccctg

SEQ ID NO: 4493 - DNA, 13 bp, Artificial Sequence
  synthetic sequence
catcattgggccc

SEQ ID NO: 4494 - DNA, 13 bp, Artificial Sequence
  synthetic sequence
aagtcttcagtca

SEQ ID NO: 4495 - DNA, 13 bp, Artificial Sequence
  synthetic sequence
aatcaatctcaat

SEQ ID NO: 4496 - DNA, 13 bp, Artificial Sequence
  synthetic sequence
aaaactaaaatca

SEQ ID NO: 4497 - DNA, 13 bp, Artificial Sequence
  synthetic sequence
tcttgacaatatg

SEQ ID NO: 4498 - DNA, 13 bp, Artificial Sequence
  synthetic sequence
acttaaagcactg

SEQ ID NO: 4499 - DNA, 13 bp, Artificial Sequence
  synthetic sequence
aaactagacacaa

SEQ ID NO: 4500 - DNA, 13 bp, Artificial Sequence
  synthetic sequence
aatgcagatttgt

SEQ ID NO: 4501 - DNA, 13 bp, Artificial Sequence
  synthetic sequence
atttgcctttacg

SEQ ID NO: 4502 - DNA, 13 bp, Artificial Sequence
  synthetic sequence
ttactgtgatcca

SEQ ID NO: 4503 - DNA, 13 bp, Artificial Sequence
  synthetic sequence
tatcattaacact

SEQ ID NO: 4504 - DNA, 13 bp, Artificial Sequence
  synthetic sequence
tggttcgaaaaca

SEQ ID NO: 4505 - DNA, 13 bp, Artificial Sequence
  synthetic sequence
ttagtgaagagag

SEQ ID NO: 4506 - DNA, 13 bp, Artificial Sequence
  synthetic sequence
tcaggtcccactg

SEQ ID NO: 4507 - DNA, 13 bp, Artificial Sequence
  synthetic sequence
tcactcatgtaat

SEQ ID NO: 4508 - DNA, 13 bp, Artificial Sequence
  synthetic sequence
aatcaacctcaat

SEQ ID NO: 4509 - DNA, 13 bp, Artificial Sequence
  synthetic sequence
tggacttcagtgg

SEQ ID NO: 4510 - DNA, 13 bp, Artificial Sequence
  synthetic sequence
tttttgttgattc

SEQ ID NO: 4511 - DNA, 13 bp, Artificial Sequence
  synthetic sequence
gatcttgatcttg

SEQ ID NO: 4512 - DNA, 13 bp, Artificial Sequence
  synthetic sequence
tggcacatgtaag

SEQ ID NO: 4513 - DNA, 13 bp, Artificial Sequence
  synthetic sequence
aatgatgttctcc

SEQ ID NO: 4514 - DNA, 13 bp, Artificial Sequence
  synthetic sequence
tatgtccttgttg

SEQ ID NO: 4515 - DNA, 13 bp, Artificial Sequence
  synthetic sequence
ttgatttactata

SEQ ID NO: 4516 - DNA, 13 bp, Artificial Sequence
  synthetic sequence
cacatgtaatccc

SEQ ID NO: 4517 - DNA, 13 bp, Artificial Sequence
  synthetic sequence
tgtgttcacctga

SEQ ID NO: 4518 - DNA, 13 bp, Artificial Sequence
  synthetic sequence
cacatatagtccc

SEQ ID NO: 4519 - DNA, 13 bp, Artificial Sequence
  synthetic sequence
acctccaacagtc

SEQ ID NO: 4520 - DNA, 13 bp, Artificial Sequence
  synthetic sequence
ccctgatgacaac

SEQ ID NO: 4521 - DNA, 13 bp, Artificial Sequence
  synthetic sequence
tcctccaatgagt

SEQ ID NO: 4522 - DNA, 13 bp, Artificial Sequence
  synthetic sequence
ttgttgagaaggt

SEQ ID NO: 4523 - DNA, 13 bp, Artificial Sequence
  synthetic sequence
ttgagacaccagg

SEQ ID NO: 4524 - DNA, 13 bp, Artificial Sequence
  synthetic sequence
accatcaccttcc

SEQ ID NO: 4525 - DNA, 13 bp, Artificial Sequence
  synthetic sequence
acagatcaactgg

SEQ ID NO: 4526 - DNA, 13 bp, Artificial Sequence
  synthetic sequence
aacttaaggactg

SEQ ID NO: 4527 - DNA, 13 bp, Artificial Sequence
  synthetic sequence
gtaaaggatgcca

SEQ ID NO: 4528 - DNA, 13 bp, Artificial Sequence
  synthetic sequence
catcacaatcaag

SEQ ID NO: 4529 - DNA, 13 bp, Artificial Sequence
  synthetic sequence
aacttgaatctat

SEQ ID NO: 4530 - DNA, 13 bp, Artificial Sequence
  synthetic sequence
aggttcttttctg

SEQ ID NO: 4531 - DNA, 13 bp, Artificial Sequence
  synthetic sequence
gcaatcacttcct

SEQ ID NO: 4532 - DNA, 13 bp, Artificial Sequence
  synthetic sequence
ctgttattgactg

SEQ ID NO: 4533 - DNA, 13 bp, Artificial Sequence
  synthetic sequence
ttgatagcttcag

SEQ ID NO: 4534 - DNA, 13 bp, Artificial Sequence
  synthetic sequence
agaagtcttcaag

SEQ ID NO: 4535 - DNA, 13 bp, Artificial Sequence
  synthetic sequence
taagactgtggtg

SEQ ID NO: 4536 - DNA, 13 bp, Artificial Sequence
  synthetic sequence
tggtttgaaaaca

SEQ ID NO: 4537 - DNA, 13 bp, Artificial Sequence
  synthetic sequence
tatgttcttgttg

SEQ ID NO: 4538 - DNA, 13 bp, Artificial Sequence
  synthetic sequence
tcatataatagtg

SEQ ID NO: 4539 - DNA, 13 bp, Artificial Sequence
  synthetic sequence
caaccaaacctga

SEQ ID NO: 4540 - DNA, 13 bp, Artificial Sequence
  synthetic sequence
acttccatatcaa

SEQ ID NO: 4541 - DNA, 13 bp, Artificial Sequence
  synthetic sequence
aaagaagtcctca

SEQ ID NO: 4542 - DNA, 13 bp, Artificial Sequence
  synthetic sequence
acatatgattcaa

SEQ ID NO: 4543 - DNA, 13 bp, Artificial Sequence
  synthetic sequence
acatgtagtccca

SEQ ID NO: 4544 - DNA, 13 bp, Artificial Sequence
  synthetic sequence
acaacttggtatc

SEQ ID NO: 4545 - DNA, 13 bp, Artificial Sequence
  synthetic sequence
acagatgaacagg

SEQ ID NO: 4546 - DNA, 13 bp, Artificial Sequence
  synthetic sequence
tgaacctattagt

SEQ ID NO: 4547 - DNA, 13 bp, Artificial Sequence
  synthetic sequence
atggtgtaaatgt

SEQ ID NO: 4548 - DNA, 13 bp, Artificial Sequence
  synthetic sequence
ctcacataagact

SEQ ID NO: 4549 - DNA, 13 bp, Artificial Sequence
  synthetic sequence
tgttcacatccat

SEQ ID NO: 4550 - DNA, 13 bp, Artificial Sequence
  synthetic sequence
ctccaacaatctg

SEQ ID NO: 4551 - DNA, 13 bp, Artificial Sequence
  synthetic sequence
atgggaaacaagc

SEQ ID NO: 4552 - DNA, 13 bp, Artificial Sequence
  synthetic sequence
ctatgatccatgc

SEQ ID NO: 4553 - DNA, 13 bp, Artificial Sequence
  synthetic sequence
catacagaaatct

SEQ ID NO: 4554 - DNA, 13 bp, Artificial Sequence
  synthetic sequence
gaatttgattaca

SEQ ID NO: 4555 - DNA, 13 bp, Artificial Sequence
  synthetic sequence
tcatagtcctgtt

SEQ ID NO: 4556 - DNA, 13 bp, Artificial Sequence
  synthetic sequence
atgctatagaact

SEQ ID NO: 4557 - DNA, 13 bp, Artificial Sequence
  synthetic sequence
gctgaactcctcc

SEQ ID NO: 4558 - DNA, 13 bp, Artificial Sequence
  synthetic sequence
tcataatcctgct

SEQ ID NO: 4559 - DNA, 13 bp, Artificial Sequence
  synthetic sequence
cagatggggaaca

SEQ ID NO: 4560 - DNA, 13 bp, Artificial Sequence
  synthetic sequence
tcatctttgttaa

SEQ ID NO: 4561 - DNA, 13 bp, Artificial Sequence
  synthetic sequence
gagtaaaagaagt

SEQ ID NO: 4562 - DNA, 13 bp, Artificial Sequence
  synthetic sequence
tcagatattgagg

SEQ ID NO: 4563 - DNA, 13 bp, Artificial Sequence
  synthetic sequence
ttgatttgctgta

SEQ ID NO: 4564 - DNA, 13 bp, Artificial Sequence
  synthetic sequence
ttacacctcacaa

SEQ ID NO: 4565 - DNA, 13 bp, Artificial Sequence
  synthetic sequence
attgaatcataac

SEQ ID NO: 4566 - DNA, 13 bp, Artificial Sequence
  synthetic sequence
ttgatgccttgat

SEQ ID NO: 4567 - DNA, 13 bp, Artificial Sequence
  synthetic sequence
aagtcttcggtca

SEQ ID NO: 4568 - DNA, 13 bp, Artificial Sequence
  synthetic sequence
actaagatcattt

SEQ ID NO: 4569 - DNA, 13 bp, Artificial Sequence
  synthetic sequence
gctgacttattta

SEQ ID NO: 4570 - DNA, 13 bp, Artificial Sequence
  synthetic sequence
ttctttgagacgc

SEQ ID NO: 4571 - DNA, 13 bp, Artificial Sequence
  synthetic sequence
agagggatgagat

SEQ ID NO: 4572 - DNA, 13 bp, Artificial Sequence
  synthetic sequence
tcctctgtcaagc

SEQ ID NO: 4573 - DNA, 13 bp, Artificial Sequence
  synthetic sequence
aatcataatcttg

SEQ ID NO: 4574 - DNA, 13 bp, Artificial Sequence
  synthetic sequence
acaaacatctcaa

SEQ ID NO: 4575 - DNA, 13 bp, Artificial Sequence
  synthetic sequence
tcataactgttag

SEQ ID NO: 4576 - DNA, 13 bp, Artificial Sequence
  synthetic sequence
attggaaatattc

SEQ ID NO: 4577 - DNA, 13 bp, Artificial Sequence
  synthetic sequence
tcatctagatcat

SEQ ID NO: 4578 - DNA, 13 bp, Artificial Sequence
  synthetic sequence
agaactcttgaca

SEQ ID NO: 4579 - DNA, 13 bp, Artificial Sequence
  synthetic sequence
tgattgcacaaat

SEQ ID NO: 4580 - DNA, 13 bp, Artificial Sequence
  synthetic sequence
gagtaaaagaaat

SEQ ID NO: 4581 - DNA, 13 bp, Artificial Sequence
  synthetic sequence
catacaagaatct

SEQ ID NO: 4582 - DNA, 13 bp, Artificial Sequence
  synthetic sequence
gactcttggctat

SEQ ID NO: 4583 - DNA, 13 bp, Artificial Sequence
  synthetic sequence
ttgcataggtgaa

SEQ ID NO: 4584 - DNA, 13 bp, Artificial Sequence
  synthetic sequence
atcctaggcattt

SEQ ID NO: 4585 - DNA, 13 bp, Artificial Sequence
  synthetic sequence
gtcccaactctca

SEQ ID NO: 4586 - DNA, 13 bp, Artificial Sequence
  synthetic sequence
catcaatcccatg

SEQ ID NO: 4587 - DNA, 13 bp, Artificial Sequence
  synthetic sequence
gtctccaacatgt

SEQ ID NO: 4588 - DNA, 13 bp, Artificial Sequence
  synthetic sequence
tagtgacattctt

SEQ ID NO: 4589 - DNA, 13 bp, Artificial Sequence
  synthetic sequence
acattcacatgga

SEQ ID NO: 4590 - DNA, 13 bp, Artificial Sequence
  synthetic sequence
gacctctttgtgt

SEQ ID NO: 4591 - DNA, 13 bp, Artificial Sequence
  synthetic sequence
tgcatgtggcata

SEQ ID NO: 4592 - DNA, 13 bp, Artificial Sequence
  synthetic sequence
gatgcagccaacc

SEQ ID NO: 4593 - DNA, 13 bp, Artificial Sequence
  synthetic sequence
aacaaagcagtga

SEQ ID NO: 4594 - DNA, 13 bp, Artificial Sequence
  synthetic sequence
tgcatatggcata

SEQ ID NO: 4595 - DNA, 13 bp, Artificial Sequence
  synthetic sequence
tgtggcttcccat

SEQ ID NO: 4596 - DNA, 13 bp, Artificial Sequence
  synthetic sequence
gcatggtgccgaa

SEQ ID NO: 4597 - DNA, 13 bp, Artificial Sequence
  synthetic sequence
aagggaaaacacc

SEQ ID NO: 4598 - DNA, 13 bp, Artificial Sequence
  synthetic sequence
tctgactcgagat

SEQ ID NO: 4599 - DNA, 13 bp, Artificial Sequence
  synthetic sequence
catgccagtgtca

SEQ ID NO: 4600 - DNA, 13 bp, Artificial Sequence
  synthetic sequence
caaagaacaacag

SEQ ID NO: 4601 - DNA, 13 bp, Artificial Sequence
  synthetic sequence
tggactctctctg

SEQ ID NO: 4602 - DNA, 13 bp, Artificial Sequence
  synthetic sequence
catattgccacca

SEQ ID NO: 4603 - DNA, 13 bp, Artificial Sequence
  synthetic sequence
cttataatgaaga

SEQ ID NO: 4604 - DNA, 13 bp, Artificial Sequence
  synthetic sequence
gaaatgagactgg

SEQ ID NO: 4605 - DNA, 13 bp, Artificial Sequence
  synthetic sequence
gctgtagatgcag

SEQ ID NO: 4606 - DNA, 13 bp, Artificial Sequence
  synthetic sequence
actgttgcaaatg

SEQ ID NO: 4607 - DNA, 13 bp, Artificial Sequence
  synthetic sequence
cgcttttagagat

SEQ ID NO: 4608 - DNA, 13 bp, Artificial Sequence
  synthetic sequence
gcaatgagacagg

SEQ ID NO: 4609 - DNA, 13 bp, Artificial Sequence
  synthetic sequence
gggaccattgcca

SEQ ID NO: 4610 - DNA, 13 bp, Artificial Sequence
  synthetic sequence
acaaagcagtaaa

SEQ ID NO: 4611 - DNA, 13 bp, Artificial Sequence
  synthetic sequence
acatcagtcgaag

SEQ ID NO: 4612 - DNA, 13 bp, Artificial Sequence
  synthetic sequence
tttttccaggaag

SEQ ID NO: 4613 - DNA, 13 bp, Artificial Sequence
  synthetic sequence
acatcatggtcgg

SEQ ID NO: 4614 - DNA, 13 bp, Artificial Sequence
  synthetic sequence
agtcatctgaggt

SEQ ID NO: 4615 - DNA, 13 bp, Artificial Sequence
  synthetic sequence
catcaattccatg

SEQ ID NO: 4616 - DNA, 13 bp, Artificial Sequence
  synthetic sequence
agacttggcatgg

SEQ ID NO: 4617 - DNA, 13 bp, Artificial Sequence
  synthetic sequence
ccccatcaagcat

SEQ ID NO: 4618 - DNA, 13 bp, Artificial Sequence
  synthetic sequence
agcatgcaagctc

SEQ ID NO: 4619 - DNA, 13 bp, Artificial Sequence
  synthetic sequence
gatctttttgtct

SEQ ID NO: 4620 - DNA, 13 bp, Artificial Sequence
  synthetic sequence
gcatggtgccaaa

SEQ ID NO: 4621 - DNA, 13 bp, Artificial Sequence
  synthetic sequence
tcttcttttcaac

SEQ ID NO: 4622 - DNA, 13 bp, Artificial Sequence
  synthetic sequence
tctgattccagat

SEQ ID NO: 4623 - DNA, 13 bp, Artificial Sequence
  synthetic sequence
ttgaactgtttta

SEQ ID NO: 4624 - DNA, 13 bp, Artificial Sequence
  synthetic sequence
ggggaagacacca

SEQ ID NO: 4625 - DNA, 13 bp, Artificial Sequence
  synthetic sequence
cctcatgtgatag

SEQ ID NO: 4626 - DNA, 13 bp, Artificial Sequence
  synthetic sequence
catttacatggac

SEQ ID NO: 4627 - DNA, 13 bp, Artificial Sequence
  synthetic sequence
ttgattgtctcta

SEQ ID NO: 4628 - DNA, 13 bp, Artificial Sequence
  synthetic sequence
caaggcagtgaat

SEQ ID NO: 4629 - DNA, 13 bp, Artificial Sequence
  synthetic sequence
cccactttttgtg

SEQ ID NO: 4630 - DNA, 13 bp, Artificial Sequence
  synthetic sequence
gtaatgagacagg

SEQ ID NO: 4631 - DNA, 13 bp, Artificial Sequence
  synthetic sequence
tttaggattgcgc

SEQ ID NO: 4632 - DNA, 13 bp, Artificial Sequence
  synthetic sequence
gcaggtcatctga

SEQ ID NO: 4633 - DNA, 13 bp, Artificial Sequence
  synthetic sequence
tgtgcatgtgaca

SEQ ID NO: 4634 - DNA, 13 bp, Artificial Sequence
  synthetic sequence
cattgtggcacag

SEQ ID NO: 4635 - DNA, 13 bp, Artificial Sequence
  synthetic sequence
agctgatcatgaa

SEQ ID NO: 4636 - DNA, 13 bp, Artificial Sequence
  synthetic sequence
tttttggttgcgc

SEQ ID NO: 4637 - DNA, 13 bp, Artificial Sequence
  synthetic sequence
caaagaacaatag

SEQ ID NO: 4638 - DNA, 13 bp, Artificial Sequence
  synthetic sequence
atagaggaagtga

SEQ ID NO: 4639 - DNA, 13 bp, Artificial Sequence
  synthetic sequence
tctgtggtttccc

SEQ ID NO: 4640 - DNA, 13 bp, Artificial Sequence
  synthetic sequence
tgagtacttagca

SEQ ID NO: 4641 - DNA, 13 bp, Artificial Sequence
  synthetic sequence
catgctagtgtca

SEQ ID NO: 4642 - DNA, 13 bp, Artificial Sequence
  synthetic sequence
tgcatatggcaca

SEQ ID NO: 4643 - DNA, 13 bp, Artificial Sequence
  synthetic sequence
accactgtgggac

SEQ ID NO: 4644 - DNA, 13 bp, Artificial Sequence
  synthetic sequence
gtctccagcatgt

SEQ ID NO: 4645 - DNA, 13 bp, Artificial Sequence
  synthetic sequence
taaatgatcaact

SEQ ID NO: 4646 - DNA, 13 bp, Artificial Sequence
  synthetic sequence
caattcaagtgtc

SEQ ID NO: 4647 - DNA, 13 bp, Artificial Sequence
  synthetic sequence
gtcccaaactgat

SEQ ID NO: 4648 - DNA, 13 bp, Artificial Sequence
  synthetic sequence
ccttcacctggac

SEQ ID NO: 4649 - DNA, 13 bp, Artificial Sequence
  synthetic sequence
atatcatggttgg

SEQ ID NO: 4650 - DNA, 13 bp, Artificial Sequence
  synthetic sequence
agaagaggtgatg

SEQ ID NO: 4651 - DNA, 13 bp, Artificial Sequence
  synthetic sequence
atgctggggatgc

SEQ ID NO: 4652 - DNA, 13 bp, Artificial Sequence
  synthetic sequence
gataaatgaccaa

SEQ ID NO: 4653 - DNA, 13 bp, Artificial Sequence
  synthetic sequence
gtcagacttggca

SEQ ID NO: 4654 - DNA, 13 bp, Artificial Sequence
  synthetic sequence
tgggacaaatagt

SEQ ID NO: 4655 - DNA, 13 bp, Artificial Sequence
  synthetic sequence
attctttcaagaa

SEQ ID NO: 4656 - DNA, 13 bp, Artificial Sequence
  synthetic sequence
atggaggaagaca

SEQ ID NO: 4657 - DNA, 13 bp, Artificial Sequence
  synthetic sequence
tatcaaaagacag

SEQ ID NO: 4658 - DNA, 13 bp, Artificial Sequence
  synthetic sequence
aggtttgttgcag

SEQ ID NO: 4659 - DNA, 13 bp, Artificial Sequence
  synthetic sequence
ccagagggtgaag

SEQ ID NO: 4660 - DNA, 13 bp, Artificial Sequence
  synthetic sequence
ggatcctaggcat

SEQ ID NO: 4661 - DNA, 13 bp, Artificial Sequence
  synthetic sequence
tagatgtgaattg

SEQ ID NO: 4662 - DNA, 13 bp, Artificial Sequence
  synthetic sequence
tacctgattgggt

SEQ ID NO: 4663 - DNA, 13 bp, Artificial Sequence
  synthetic sequence
acaaaagaaacac

SEQ ID NO: 4664 - DNA, 13 bp, Artificial Sequence
  synthetic sequence
tgatcatgggatt

SEQ ID NO: 4665 - DNA, 13 bp, Artificial Sequence
  synthetic sequence
agtaaaaggtgtc

SEQ ID NO: 4666 - DNA, 13 bp, Artificial Sequence
  synthetic sequence
acattagttcaat

SEQ ID NO: 4667 - DNA, 13 bp, Artificial Sequence
  synthetic sequence
cactaggtagcaa

SEQ ID NO: 4668 - DNA, 13 bp, Artificial Sequence
  synthetic sequence
cagcaagcaatga

SEQ ID NO: 4669 - DNA, 13 bp, Artificial Sequence
  synthetic sequence
aaccaaaacaagc

SEQ ID NO: 4670 - DNA, 13 bp, Artificial Sequence
  synthetic sequence
tgaactttcaaac

SEQ ID NO: 4671 - DNA, 13 bp, Artificial Sequence
  synthetic sequence
tgtctgattctga

SEQ ID NO: 4672 - DNA, 13 bp, Artificial Sequence
  synthetic sequence
aataatggttcat

SEQ ID NO: 4673 - DNA, 13 bp, Artificial Sequence
  synthetic sequence
gtgaacagatgca

SEQ ID NO: 4674 - DNA, 13 bp, Artificial Sequence
  synthetic sequence
ttgatccattcct

SEQ ID NO: 4675 - DNA, 13 bp, Artificial Sequence
  synthetic sequence
ttgaatcagatgt

SEQ ID NO: 4676 - DNA, 13 bp, Artificial Sequence
  synthetic sequence
gttcagttttacc

SEQ ID NO: 4677 - DNA, 13 bp, Artificial Sequence
  synthetic sequence
acaaggaacaagt

SEQ ID NO: 4678 - DNA, 13 bp, Artificial Sequence
  synthetic sequence
ttggtgcattgaa

SEQ ID NO: 4679 - DNA, 13 bp, Artificial Sequence
  synthetic sequence
agtatcaaatctt

SEQ ID NO: 4680 - DNA, 13 bp, Artificial Sequence
  synthetic sequence
agatactctcatt

SEQ ID NO: 4681 - DNA, 13 bp, Artificial Sequence
  synthetic sequence
gagttgtttgggc

SEQ ID NO: 4682 - DNA, 13 bp, Artificial Sequence
  synthetic sequence
tgacagatcagat

SEQ ID NO: 4683 - DNA, 13 bp, Artificial Sequence
  synthetic sequence
ataagttaccaga

SEQ ID NO: 4684 - DNA, 13 bp, Artificial Sequence
  synthetic sequence
tgggtgcatgggt

SEQ ID NO: 4685 - DNA, 13 bp, Artificial Sequence
  synthetic sequence
aacggtggataga

SEQ ID NO: 4686 - DNA, 13 bp, Artificial Sequence
  synthetic sequence
gcagaacatgtga

SEQ ID NO: 4687 - DNA, 13 bp, Artificial Sequence
  synthetic sequence
tgagtattcttgg

SEQ ID NO: 4688 - DNA, 13 bp, Artificial Sequence
  synthetic sequence
tacctgactgggt

SEQ ID NO: 4689 - DNA, 13 bp, Artificial Sequence
  synthetic sequence
aatgctggagatc

SEQ ID NO: 4690 - DNA, 13 bp, Artificial Sequence
  synthetic sequence
atggttcactatt

SEQ ID NO: 4691 - DNA, 13 bp, Artificial Sequence
  synthetic sequence
aggacaaatctgt

SEQ ID NO: 4692 - DNA, 13 bp, Artificial Sequence
  synthetic sequence
tacttgacatggg

SEQ ID NO: 4693 - DNA, 13 bp, Artificial Sequence
  synthetic sequence
ctattgacccatt

SEQ ID NO: 4694 - DNA, 13 bp, Artificial Sequence
  synthetic sequence
catggtatgttga

SEQ ID NO: 4695 - DNA, 13 bp, Artificial Sequence
  synthetic sequence
gttggggacactt

SEQ ID NO: 4696 - DNA, 13 bp, Artificial Sequence
  synthetic sequence
ggtggaggtgttg

SEQ ID NO: 4697 - DNA, 13 bp, Artificial Sequence
  synthetic sequence
aggtacactcatt

SEQ ID NO: 4698 - DNA, 13 bp, Artificial Sequence
  synthetic sequence
aaatgtgttcggg

SEQ ID NO: 4699 - DNA, 13 bp, Artificial Sequence
  synthetic sequence
tgcagatcgaaga

SEQ ID NO: 4700 - DNA, 13 bp, Artificial Sequence
  synthetic sequence
gatgttaactgtg

SEQ ID NO: 4701 - DNA, 13 bp, Artificial Sequence
  synthetic sequence
tcctccaaaatct

SEQ ID NO: 4702 - DNA, 13 bp, Artificial Sequence
  synthetic sequence
gtcagacagtgag

SEQ ID NO: 4703 - DNA, 13 bp, Artificial Sequence
  synthetic sequence
agaaatgggttga

SEQ ID NO: 4704 - DNA, 13 bp, Artificial Sequence
  synthetic sequence
cagcaggcaatga

SEQ ID NO: 4705 - DNA, 13 bp, Artificial Sequence
  synthetic sequence
aaagaacaagtgg

SEQ ID NO: 4706 - DNA, 13 bp, Artificial Sequence
  synthetic sequence
acaatcagttatc

SEQ ID NO: 4707 - DNA, 13 bp, Artificial Sequence
  synthetic sequence
agggactgtaggg

SEQ ID NO: 4708 - DNA, 13 bp, Artificial Sequence
  synthetic sequence
ccatttttattct

SEQ ID NO: 4709 - DNA, 13 bp, Artificial Sequence
  synthetic sequence
agtccaaagagtg

SEQ ID NO: 4710 - DNA, 13 bp, Artificial Sequence
  synthetic sequence
cttttgtggggca

SEQ ID NO: 4711 - DNA, 13 bp, Artificial Sequence
  synthetic sequence
cagagggtgaggg

SEQ ID NO: 4712 - DNA, 13 bp, Artificial Sequence
  synthetic sequence
gatggaggagttg

SEQ ID NO: 4713 - DNA, 13 bp, Artificial Sequence
  synthetic sequence
tacaaagaacaag

SEQ ID NO: 4714 - DNA, 13 bp, Artificial Sequence
  synthetic sequence
acatggggcaagg

SEQ ID NO: 4715 - DNA, 13 bp, Artificial Sequence
  synthetic sequence
acaatggctctct

SEQ ID NO: 4716 - DNA, 13 bp, Artificial Sequence
  synthetic sequence
tggtttccacata

SEQ ID NO: 4717 - DNA, 13 bp, Artificial Sequence
  synthetic sequence
atcagaaaacagg

SEQ ID NO: 4718 - DNA, 13 bp, Artificial Sequence
  synthetic sequence
atcccattgatcc

SEQ ID NO: 4719 - DNA, 13 bp, Artificial Sequence
  synthetic sequence
caggtgaatgctc

SEQ ID NO: 4720 - DNA, 13 bp, Artificial Sequence
  synthetic sequence
tgaccttgttgtg

SEQ ID NO: 4721 - DNA, 13 bp, Artificial Sequence
  synthetic sequence
cagactgatccag

SEQ ID NO: 4722 - DNA, 13 bp, Artificial Sequence
  synthetic sequence
agtgttgggagcg

SEQ ID NO: 4723 - DNA, 13 bp, Artificial Sequence
  synthetic sequence
gcgatgggagaca

SEQ ID NO: 4724 - DNA, 13 bp, Artificial Sequence
  synthetic sequence
ggccaatgagagg

SEQ ID NO: 4725 - DNA, 13 bp, Artificial Sequence
  synthetic sequence
ggaaattggctgg

SEQ ID NO: 4726 - DNA, 13 bp, Artificial Sequence
  synthetic sequence
gttcctgggtgtt

SEQ ID NO: 4727 - DNA, 13 bp, Artificial Sequence
  synthetic sequence
tcattccgaaatc

SEQ ID NO: 4728 - DNA, 13 bp, Artificial Sequence
  synthetic sequence
gggttgtgcagaa

SEQ ID NO: 4729 - DNA, 13 bp, Artificial Sequence
  synthetic sequence
tgaaccctagcaa

SEQ ID NO: 4730 - DNA, 13 bp, Artificial Sequence
  synthetic sequence
accttaaaaagtg

SEQ ID NO: 4731 - DNA, 13 bp, Artificial Sequence
  synthetic sequence
aagacctttctgt

SEQ ID NO: 4732 - DNA, 13 bp, Artificial Sequence
  synthetic sequence
tctgtgcctggat

SEQ ID NO: 4733 - DNA, 13 bp, Artificial Sequence
  synthetic sequence
ttcagccaacaat

SEQ ID NO: 4734 - DNA, 13 bp, Artificial Sequence
  synthetic sequence
caccctctcagaa

SEQ ID NO: 4735 - DNA, 13 bp, Artificial Sequence
  synthetic sequence
aaatatttgtgac

SEQ ID NO: 4736 - DNA, 13 bp, Artificial Sequence
  synthetic sequence
gagattgtatcag

SEQ ID NO: 4737 - DNA, 13 bp, Artificial Sequence
  synthetic sequence
aagagggaggctg

SEQ ID NO: 4738 - DNA, 13 bp, Artificial Sequence
  synthetic sequence
cccattgacccat

SEQ ID NO: 4739 - DNA, 13 bp, Artificial Sequence
  synthetic sequence
agatttgttgcag

SEQ ID NO: 4740 - DNA, 13 bp, Artificial Sequence
  synthetic sequence
attgtctctcatt

SEQ ID NO: 4741 - DNA, 13 bp, Artificial Sequence
  synthetic sequence
agtgaactgttgc

SEQ ID NO: 4742 - DNA, 13 bp, Artificial Sequence
  synthetic sequence
tgatgaatgggaa

SEQ ID NO: 4743 - DNA, 13 bp, Artificial Sequence
  synthetic sequence
ttgagcggaggca

SEQ ID NO: 4744 - DNA, 13 bp, Artificial Sequence
  synthetic sequence
ctgacccacaagc

SEQ ID NO: 4745 - DNA, 13 bp, Artificial Sequence
  synthetic sequence
ttaattgaggagg

SEQ ID NO: 4746 - DNA, 13 bp, Artificial Sequence
  synthetic sequence
tgatcatgaatgc

SEQ ID NO: 4747 - DNA, 13 bp, Artificial Sequence
  synthetic sequence
tacggtggaggtg

SEQ ID NO: 4748 - DNA, 13 bp, Artificial Sequence
  synthetic sequence
catataaagaaca

SEQ ID NO: 4749 - DNA, 13 bp, Artificial Sequence
  synthetic sequence
tctcacatcagtt

SEQ ID NO: 4750 - DNA, 13 bp, Artificial Sequence
  synthetic sequence
agaacattgggta

SEQ ID NO: 4751 - DNA, 13 bp, Artificial Sequence
  synthetic sequence
atcttactttctg

SEQ ID NO: 4752 - DNA, 13 bp, Artificial Sequence
  synthetic sequence
gcctggtttgttg

SEQ ID NO: 4753 - DNA, 13 bp, Artificial Sequence
  synthetic sequence
tcacacccactat

SEQ ID NO: 4754 - DNA, 13 bp, Artificial Sequence
  synthetic sequence
tgcaatgttggag

SEQ ID NO: 4755 - DNA, 13 bp, Artificial Sequence
  synthetic sequence
atggaggaggaca

SEQ ID NO: 4756 - DNA, 13 bp, Artificial Sequence
  synthetic sequence
agactgaagggaa

SEQ ID NO: 4757 - DNA, 13 bp, Artificial Sequence
  synthetic sequence
ttggagcatgggt

SEQ ID NO: 4758 - DNA, 13 bp, Artificial Sequence
  synthetic sequence
ttaaagaaaagga

SEQ ID NO: 4759 - DNA, 13 bp, Artificial Sequence
  synthetic sequence
cggtggatggaca

SEQ ID NO: 4760 - DNA, 13 bp, Artificial Sequence
  synthetic sequence
gagattggtgata

SEQ ID NO: 4761 - DNA, 13 bp, Artificial Sequence
  synthetic sequence
ttgatatgggaca

SEQ ID NO: 4762 - DNA, 13 bp, Artificial Sequence
  synthetic sequence
gtctgatgctgtc

SEQ ID NO: 4763 - DNA, 13 bp, Artificial Sequence
  synthetic sequence
gcactttcacttg

SEQ ID NO: 4764 - DNA, 13 bp, Artificial Sequence
  synthetic sequence
tccaaaaccttag

SEQ ID NO: 4765 - DNA, 13 bp, Artificial Sequence
  synthetic sequence
caacaggcaatga

SEQ ID NO: 4766 - DNA, 13 bp, Artificial Sequence
  synthetic sequence
tggtggaagaaaa

SEQ ID NO: 4767 - DNA, 13 bp, Artificial Sequence
  synthetic sequence
agtttgtgagccc

SEQ ID NO: 4768 - DNA, 13 bp, Artificial Sequence
  synthetic sequence
agaattctccatg

SEQ ID NO: 4769 - DNA, 13 bp, Artificial Sequence
  synthetic sequence
gttgtccctacaa

SEQ ID NO: 4770 - DNA, 13 bp, Artificial Sequence
  synthetic sequence
ataaggaacaagt

SEQ ID NO: 4771 - DNA, 13 bp, Artificial Sequence
  synthetic sequence
acaaaggaaacac

SEQ ID NO: 4772 - DNA, 13 bp, Artificial Sequence
  synthetic sequence
ttgaagaagagta

SEQ ID NO: 4773 - DNA, 13 bp, Artificial Sequence
  synthetic sequence
cctccagggtctg

SEQ ID NO: 4774 - DNA, 13 bp, Artificial Sequence
  synthetic sequence
aacaggcgatgag

SEQ ID NO: 4775 - DNA, 13 bp, Artificial Sequence
  synthetic sequence
gtttcattggttg

SEQ ID NO: 4776 - DNA, 13 bp, Artificial Sequence
  synthetic sequence
ttgtggggcacca

SEQ ID NO: 4777 - DNA, 13 bp, Artificial Sequence
  synthetic sequence
acaatgccagtgg

SEQ ID NO: 4778 - DNA, 13 bp, Artificial Sequence
  synthetic sequence
tgcagtgttggag

SEQ ID NO: 4779 - DNA, 13 bp, Artificial Sequence
  synthetic sequence
atgtcaactgtga

SEQ ID NO: 4780 - DNA, 13 bp, Artificial Sequence
  synthetic sequence
ttgaagaggagta

SEQ ID NO: 4781 - DNA, 13 bp, Artificial Sequence
  synthetic sequence
gtctcaaataagt

SEQ ID NO: 4782 - DNA, 13 bp, Artificial Sequence
  synthetic sequence
ttcacttggttcc

SEQ ID NO: 4783 - DNA, 13 bp, Artificial Sequence
  synthetic sequence
tgtgttctgggtc

SEQ ID NO: 4784 - DNA, 13 bp, Artificial Sequence
  synthetic sequence
atcaaatgctttg

SEQ ID NO: 4785 - DNA, 13 bp, Artificial Sequence
  synthetic sequence
aacaagcaatgag

SEQ ID NO: 4786 - DNA, 13 bp, Artificial Sequence
  synthetic sequence
aacgttctcaaaa

SEQ ID NO: 4787 - DNA, 13 bp, Artificial Sequence
  synthetic sequence
ctctagcagacca

SEQ ID NO: 4788 - DNA, 13 bp, Artificial Sequence
  synthetic sequence
agacagttaaggt

SEQ ID NO: 4789 - DNA, 13 bp, Artificial Sequence
  synthetic sequence
aggggctgtaggg

SEQ ID NO: 4790 - DNA, 13 bp, Artificial Sequence
  synthetic sequence
atggaggaagata

SEQ ID NO: 4791 - DNA, 13 bp, Artificial Sequence
  synthetic sequence
atagacagcagga

SEQ ID NO: 4792 - DNA, 13 bp, Artificial Sequence
  synthetic sequence
cttctgtggggca

SEQ ID NO: 4793 - DNA, 13 bp, Artificial Sequence
  synthetic sequence
tactgacacatcc

SEQ ID NO: 4794 - DNA, 13 bp, Artificial Sequence
  synthetic sequence
tgtcttacaagga

SEQ ID NO: 4795 - DNA, 13 bp, Artificial Sequence
  synthetic sequence
actgaggtcatta

SEQ ID NO: 4796 - DNA, 13 bp, Artificial Sequence
  synthetic sequence
ccttgtctcttgt

SEQ ID NO: 4797 - DNA, 13 bp, Artificial Sequence
  synthetic sequence
ccgttactctagc

SEQ ID NO: 4798 - DNA, 13 bp, Artificial Sequence
  synthetic sequence
gaagtgaagaagg

SEQ ID NO: 4799 - DNA, 13 bp, Artificial Sequence
  synthetic sequence
caatgctggaggt

SEQ ID NO: 4800 - DNA, 13 bp, Artificial Sequence
  synthetic sequence
ccccacaattagt

SEQ ID NO: 4801 - DNA, 13 bp, Artificial Sequence
  synthetic sequence
gagaagttgggga

SEQ ID NO: 4802 - DNA, 13 bp, Artificial Sequence
  synthetic sequence
agttatcagaaaa

SEQ ID NO: 4803 - DNA, 13 bp, Artificial Sequence
  synthetic sequence
gaacactgggtag

SEQ ID NO: 4804 - DNA, 13 bp, Artificial Sequence
  synthetic sequence
catgtgaggagtt

SEQ ID NO: 4805 - DNA, 13 bp, Artificial Sequence
  synthetic sequence
ttatgaatgcaaa

SEQ ID NO: 4806 - DNA, 13 bp, Artificial Sequence
  synthetic sequence
gtccatttctatt

SEQ ID NO: 4807 - DNA, 13 bp, Artificial Sequence
  synthetic sequence
acgggaccttgtc

SEQ ID NO: 4808 - DNA, 13 bp, Artificial Sequence
  synthetic sequence
gactaaagggaag

SEQ ID NO: 4809 - DNA, 13 bp, Artificial Sequence
  synthetic sequence
ttgagcccccatc

SEQ ID NO: 4810 - DNA, 13 bp, Artificial Sequence
  synthetic sequence
atctggttctagg

SEQ ID NO: 4811 - DNA, 13 bp, Artificial Sequence
  synthetic sequence
tctaattgacaca

SEQ ID NO: 4812 - DNA, 13 bp, Artificial Sequence
  synthetic sequence
tgtatggtggggg

SEQ ID NO: 4813 - DNA, 13 bp, Artificial Sequence
  synthetic sequence
attttactttctg

SEQ ID NO: 4814 - DNA, 13 bp, Artificial Sequence
  synthetic sequence
attgaggaagagt

SEQ ID NO: 4815 - DNA, 13 bp, Artificial Sequence
  synthetic sequence
gtggtaacaggga

SEQ ID NO: 4816 - DNA, 13 bp, Artificial Sequence
  synthetic sequence
ggggcattgagtg

SEQ ID NO: 4817 - DNA, 13 bp, Artificial Sequence
  synthetic sequence
caccagctgacct

SEQ ID NO: 4818 - DNA, 13 bp, Artificial Sequence
  synthetic sequence
gtccatttttgtt

SEQ ID NO: 4819 - DNA, 13 bp, Artificial Sequence
  synthetic sequence
tgtatggtggagg

SEQ ID NO: 4820 - DNA, 13 bp, Artificial Sequence
  synthetic sequence
tgattaaaggtga

SEQ ID NO: 4821 - DNA, 13 bp, Artificial Sequence
  synthetic sequence
gggtcaatgataa

SEQ ID NO: 4822 - DNA, 13 bp, Artificial Sequence
  synthetic sequence
atgaccatggggt

SEQ ID NO: 4823 - DNA, 13 bp, Artificial Sequence
  synthetic sequence
cgggacctcattc

SEQ ID NO: 4824 - DNA, 13 bp, Artificial Sequence
  synthetic sequence
tcacacctactat

SEQ ID NO: 4825 - DNA, 13 bp, Artificial Sequence
  synthetic sequence
gacacttcatctg

SEQ ID NO: 4826 - DNA, 13 bp, Artificial Sequence
  synthetic sequence
ctctcttctgagg

SEQ ID NO: 4827 - DNA, 13 bp, Artificial Sequence
  synthetic sequence
caatacttgatat

SEQ ID NO: 4828 - DNA, 13 bp, Artificial Sequence
  synthetic sequence
aaacggttgaatc

SEQ ID NO: 4829 - DNA, 13 bp, Artificial Sequence
  synthetic sequence
gagagattggtga

SEQ ID NO: 4830 - DNA, 13 bp, Artificial Sequence
  synthetic sequence
aaacgcagtcaaa

SEQ ID NO: 4831 - DNA, 13 bp, Artificial Sequence
  synthetic sequence
acaatcagttacc

SEQ ID NO: 4832 - DNA, 13 bp, Artificial Sequence
  synthetic sequence
gtggtttccacac

SEQ ID NO: 4833 - DNA, 13 bp, Artificial Sequence
  synthetic sequence
gcagaacatgcga

SEQ ID NO: 4834 - DNA, 13 bp, Artificial Sequence
  synthetic sequence
tgtgaactgtgag

SEQ ID NO: 4835 - DNA, 13 bp, Artificial Sequence
  synthetic sequence
ccagacaattagg

SEQ ID NO: 4836 - DNA, 13 bp, Artificial Sequence
  synthetic sequence
accagaagacagg

SEQ ID NO: 4837 - DNA, 13 bp, Artificial Sequence
  synthetic sequence
agtgtgttagagg

SEQ ID NO: 4838 - DNA, 13 bp, Artificial Sequence
  synthetic sequence
ttaaggctatcta

SEQ ID NO: 4839 - DNA, 13 bp, Artificial Sequence
  synthetic sequence
ggtctgcaaaact

SEQ ID NO: 4840 - DNA, 13 bp, Artificial Sequence
  synthetic sequence
gaacggaggcaac

SEQ ID NO: 4841 - DNA, 13 bp, Artificial Sequence
  synthetic sequence
tgtctgactctga

SEQ ID NO: 4842 - DNA, 13 bp, Artificial Sequence
  synthetic sequence
tattggattgcgc

SEQ ID NO: 4843 - DNA, 13 bp, Artificial Sequence
  synthetic sequence
agacaatggatgg

SEQ ID NO: 4844 - DNA, 13 bp, Artificial Sequence
  synthetic sequence
gcttgttgttcaa

SEQ ID NO: 4845 - DNA, 13 bp, Artificial Sequence
  synthetic sequence
agaacagaaaggc

SEQ ID NO: 4846 - DNA, 13 bp, Artificial Sequence
  synthetic sequence
tggtcctttgtga

SEQ ID NO: 4847 - DNA, 13 bp, Artificial Sequence
  synthetic sequence
atctttcccccat

SEQ ID NO: 4848 - DNA, 13 bp, Artificial Sequence
  synthetic sequence
agaggcatggtca

SEQ ID NO: 4849 - DNA, 13 bp, Artificial Sequence
  synthetic sequence
tgaccagtgctgt

SEQ ID NO: 4850 - DNA, 13 bp, Artificial Sequence
  synthetic sequence
aagaggaaataac

SEQ ID NO: 4851 - DNA, 13 bp, Artificial Sequence
  synthetic sequence
tgctcatttgtgc

SEQ ID NO: 4852 - DNA, 13 bp, Artificial Sequence
  synthetic sequence
ggttactgctcca

SEQ ID NO: 4853 - DNA, 13 bp, Artificial Sequence
  synthetic sequence
ctcatctcttcca

SEQ ID NO: 4854 - DNA, 13 bp, Artificial Sequence
  synthetic sequence
cctattctcagct

SEQ ID NO: 4855 - DNA, 13 bp, Artificial Sequence
  synthetic sequence
tcatctgtgcttc

SEQ ID NO: 4856 - DNA, 13 bp, Artificial Sequence
  synthetic sequence
ctgctcaacctgg

SEQ ID NO: 4857 - DNA, 13 bp, Artificial Sequence
  synthetic sequence
agggcattgtcat

SEQ ID NO: 4858 - DNA, 13 bp, Artificial Sequence
  synthetic sequence
caagcattgacag

SEQ ID NO: 4859 - DNA, 13 bp, Artificial Sequence
  synthetic sequence
gatgctcaggctc

SEQ ID NO: 4860 - DNA, 13 bp, Artificial Sequence
  synthetic sequence
gatttgaatgatg

SEQ ID NO: 4861 - DNA, 13 bp, Artificial Sequence
  synthetic sequence
ggcaaagaagaaa

SEQ ID NO: 4862 - DNA, 13 bp, Artificial Sequence
  synthetic sequence
atcttttccactt

SEQ ID NO: 4863 - DNA, 13 bp, Artificial Sequence
  synthetic sequence
caacagggctgac

SEQ ID NO: 4864 - DNA, 13 bp, Artificial Sequence
  synthetic sequence
ccattgaagtcac

SEQ ID NO: 4865 - DNA, 13 bp, Artificial Sequence
  synthetic sequence
agataaccgatgg

SEQ ID NO: 4866 - DNA, 13 bp, Artificial Sequence
  synthetic sequence
ggacagaaaggcc

SEQ ID NO: 4867 - DNA, 13 bp, Artificial Sequence
  synthetic sequence
gttatcatgttgt

SEQ ID NO: 4868 - DNA, 13 bp, Artificial Sequence
  synthetic sequence
gtggatcctaggc

SEQ ID NO: 4869 - DNA, 13 bp, Artificial Sequence
  synthetic sequence
aacaaggtcaagt

SEQ ID NO: 4870 - DNA, 13 bp, Artificial Sequence
  synthetic sequence
catctcagtgatc

SEQ ID NO: 4871 - DNA, 13 bp, Artificial Sequence
  synthetic sequence
tggttctttgtga

SEQ ID NO: 4872 - DNA, 13 bp, Artificial Sequence
  synthetic sequence
ctttacagtcagc

SEQ ID NO: 4873 - DNA, 13 bp, Artificial Sequence
  synthetic sequence
tacaggtggtgaa

SEQ ID NO: 4874 - DNA, 13 bp, Artificial Sequence
  synthetic sequence
gcgctttgctttt

SEQ ID NO: 4875 - DNA, 13 bp, Artificial Sequence
  synthetic sequence
atactcatttgtg

SEQ ID NO: 4876 - DNA, 13 bp, Artificial Sequence
  synthetic sequence
ggcaggttgactt

SEQ ID NO: 4877 - DNA, 13 bp, Artificial Sequence
  synthetic sequence
cccgcactgtgct

SEQ ID NO: 4878 - DNA, 13 bp, Artificial Sequence
  synthetic sequence
agtcggcagggtt

SEQ ID NO: 4879 - DNA, 13 bp, Artificial Sequence
  synthetic sequence
ctatcttttccat

SEQ ID NO: 4880 - DNA, 13 bp, Artificial Sequence
  synthetic sequence
atggcatcttgaa

SEQ ID NO: 4881 - DNA, 13 bp, Artificial Sequence
  synthetic sequence
taacccctcactg

SEQ ID NO: 4882 - DNA, 13 bp, Artificial Sequence
  synthetic sequence
cattaaagtcaca

SEQ ID NO: 4883 - DNA, 13 bp, Artificial Sequence
  synthetic sequence
aggggcattgtca

SEQ ID NO: 4884 - DNA, 13 bp, Artificial Sequence
  synthetic sequence
atcctcaaatcca

SEQ ID NO: 4885 - DNA, 13 bp, Artificial Sequence
  synthetic sequence
gatgctcaagctc

SEQ ID NO: 4886 - DNA, 13 bp, Artificial Sequence
  synthetic sequence
tgaccagtgcagt

SEQ ID NO: 4887 - DNA, 13 bp, Artificial Sequence
  synthetic sequence
aaggtcattagaa

SEQ ID NO: 4888 - DNA, 13 bp, Artificial Sequence
  synthetic sequence
tatctcttccact

SEQ ID NO: 4889 - DNA, 13 bp, Artificial Sequence
  synthetic sequence
tgtactgcacact

SEQ ID NO: 4890 - DNA, 13 bp, Artificial Sequence
  synthetic sequence
caaacaatggatg

SEQ ID NO: 4891 - DNA, 13 bp, Artificial Sequence
  synthetic sequence
agtgctgtcatag

SEQ ID NO: 4892 - DNA, 13 bp, Artificial Sequence
  synthetic sequence
actttcaaccagt

SEQ ID NO: 4893 - DNA, 13 bp, Artificial Sequence
  synthetic sequence
atctcttccatct

SEQ ID NO: 4894 - DNA, 13 bp, Artificial Sequence
  synthetic sequence
ctccttatagctt

SEQ ID NO: 4895 - DNA, 13 bp, Artificial Sequence
  synthetic sequence
atctcttccattt

SEQ ID NO: 4896 - DNA, 13 bp, Artificial Sequence
  synthetic sequence
cattgaaatcaca

SEQ ID NO: 4897 - DNA, 13 bp, Artificial Sequence
  synthetic sequence
tgagtgcctcaaa

SEQ ID NO: 4898 - DNA, 13 bp, Artificial Sequence
  synthetic sequence
gaggcatagtcat

SEQ ID NO: 4899 - DNA, 13 bp, Artificial Sequence
  synthetic sequence
tgaaatcaaaagt

SEQ ID NO: 4900 - DNA, 13 bp, Artificial Sequence
  synthetic sequence
ctagttctctgtg

SEQ ID NO: 4901 - DNA, 13 bp, Artificial Sequence
  synthetic sequence
ggcaggttgacct

SEQ ID NO: 4902 - DNA, 13 bp, Artificial Sequence
  synthetic sequence
actgctccaacat

SEQ ID NO: 4903 - DNA, 13 bp, Artificial Sequence
  synthetic sequence
agaacagagaggc

SEQ ID NO: 4904 - DNA, 13 bp, Artificial Sequence
  synthetic sequence
tggttctctgtga

SEQ ID NO: 4905 - DNA, 13 bp, Artificial Sequence
  synthetic sequence
tgacctattctca

SEQ ID NO: 4906 - DNA, 13 bp, Artificial Sequence
  synthetic sequence
gctgcacagccag

SEQ ID NO: 4907 - DNA, 13 bp, Artificial Sequence
  synthetic sequence
tctctgtgatcat

SEQ ID NO: 4908 - DNA, 13 bp, Artificial Sequence
  synthetic sequence
gtaaagaagaaat

SEQ ID NO: 4909 - DNA, 13 bp, Artificial Sequence
  synthetic sequence
caaaagtcatcag

SEQ ID NO: 4910 - DNA, 13 bp, Artificial Sequence
  synthetic sequence
ggcatggtcatgt

SEQ ID NO: 4911 - DNA, 13 bp, Artificial Sequence
  synthetic sequence
tgcaatctgcagg

SEQ ID NO: 4912 - DNA, 13 bp, Artificial Sequence
  synthetic sequence
agataaccaatag

SEQ ID NO: 4913 - DNA, 13 bp, Artificial Sequence
  synthetic sequence
attctgaaggtca

SEQ ID NO: 4914 - DNA, 13 bp, Artificial Sequence
  synthetic sequence
caaaaacaagaga

SEQ ID NO: 4915 - DNA, 13 bp, Artificial Sequence
  synthetic sequence
cattaagaaaaag

SEQ ID NO: 4916 - DNA, 13 bp, Artificial Sequence
  synthetic sequence
actagattctcag

SEQ ID NO: 4917 - DNA, 13 bp, Artificial Sequence
  synthetic sequence
tcatctttctgcc

SEQ ID NO: 4918 - DNA, 13 bp, Artificial Sequence
  synthetic sequence
aagctttatgatc

SEQ ID NO: 4919 - DNA, 13 bp, Artificial Sequence
  synthetic sequence
atgcatgtcagtg

SEQ ID NO: 4920 - DNA, 13 bp, Artificial Sequence
  synthetic sequence
tttggaatagcag

SEQ ID NO: 4921 - DNA, 13 bp, Artificial Sequence
  synthetic sequence
taaatattggaca

SEQ ID NO: 4922 - DNA, 13 bp, Artificial Sequence
  synthetic sequence
tgattaagaaaaa

SEQ ID NO: 4923 - DNA, 13 bp, Artificial Sequence
  synthetic sequence
ctgcagaaattga

SEQ ID NO: 4924 - DNA, 13 bp, Artificial Sequence
  synthetic sequence
cgaagaacattaa

SEQ ID NO: 4925 - DNA, 13 bp, Artificial Sequence
  synthetic sequence
actttattaaaac

SEQ ID NO: 4926 - DNA, 13 bp, Artificial Sequence
  synthetic sequence
gaaaaagtcccag

SEQ ID NO: 4927 - DNA, 13 bp, Artificial Sequence
  synthetic sequence
aagaaaccatata

SEQ ID NO: 4928 - DNA, 13 bp, Artificial Sequence
  synthetic sequence
acctgattgttgc

SEQ ID NO: 4929 - DNA, 13 bp, Artificial Sequence
  synthetic sequence
aaaaccacacatg

SEQ ID NO: 4930 - DNA, 13 bp, Artificial Sequence
  synthetic sequence
acattggctggtg

SEQ ID NO: 4931 - DNA, 13 bp, Artificial Sequence
  synthetic sequence
agcataaatcttg

SEQ ID NO: 4932 - DNA, 13 bp, Artificial Sequence
  synthetic sequence
cagtctttttctc

SEQ ID NO: 4933 - DNA, 13 bp, Artificial Sequence
  synthetic sequence
acttgattcagag

SEQ ID NO: 4934 - DNA, 13 bp, Artificial Sequence
  synthetic sequence
ttgctttgaagga

SEQ ID NO: 4935 - DNA, 13 bp, Artificial Sequence
  synthetic sequence
tcctcttctcaat

SEQ ID NO: 4936 - DNA, 13 bp, Artificial Sequence
  synthetic sequence
gatgggttaataa

SEQ ID NO: 4937 - DNA, 13 bp, Artificial Sequence
  synthetic sequence
cttcctaatatgc

SEQ ID NO: 4938 - DNA, 13 bp, Artificial Sequence
  synthetic sequence
atacaggtattca

SEQ ID NO: 4939 - DNA, 13 bp, Artificial Sequence
  synthetic sequence
tcagatttaacat

SEQ ID NO: 4940 - DNA, 13 bp, Artificial Sequence
  synthetic sequence
gacaacagatcat

SEQ ID NO: 4941 - DNA, 13 bp, Artificial Sequence
  synthetic sequence
ctctttctaaagg

SEQ ID NO: 4942 - DNA, 13 bp, Artificial Sequence
  synthetic sequence
atagatcaagtgt

SEQ ID NO: 4943 - DNA, 13 bp, Artificial Sequence
  synthetic sequence
cattccctagtaa

SEQ ID NO: 4944 - DNA, 13 bp, Artificial Sequence
  synthetic sequence
actattaatttag

SEQ ID NO: 4945 - DNA, 13 bp, Artificial Sequence
  synthetic sequence
taatattgaacaa

SEQ ID NO: 4946 - DNA, 13 bp, Artificial Sequence
  synthetic sequence
tccagtgataaga

SEQ ID NO: 4947 - DNA, 13 bp, Artificial Sequence
  synthetic sequence
gctttactttcct

SEQ ID NO: 4948 - DNA, 13 bp, Artificial Sequence
  synthetic sequence
tttgagagaggaa

SEQ ID NO: 4949 - DNA, 13 bp, Artificial Sequence
  synthetic sequence
gctactgagccct

SEQ ID NO: 4950 - DNA, 13 bp, Artificial Sequence
  synthetic sequence
gtagtttaaattt

SEQ ID NO: 4951 - DNA, 13 bp, Artificial Sequence
  synthetic sequence
cttgaactcagtg

SEQ ID NO: 4952 - DNA, 13 bp, Artificial Sequence
  synthetic sequence
agaatactccttt

SEQ ID NO: 4953 - DNA, 13 bp, Artificial Sequence
  synthetic sequence
gtttgaatgtcag

SEQ ID NO: 4954 - DNA, 13 bp, Artificial Sequence
  synthetic sequence
atcctaaatgcaa

SEQ ID NO: 4955 - DNA, 13 bp, Artificial Sequence
  synthetic sequence
cttgaagacatag

SEQ ID NO: 4956 - DNA, 13 bp, Artificial Sequence
  synthetic sequence
aatgggaaggaca

SEQ ID NO: 4957 - DNA, 13 bp, Artificial Sequence
  synthetic sequence
ctgattatcctcc

SEQ ID NO: 4958 - DNA, 13 bp, Artificial Sequence
  synthetic sequence
attgacatatctg

SEQ ID NO: 4959 - DNA, 13 bp, Artificial Sequence
  synthetic sequence
cacataataatgt

SEQ ID NO: 4960 - DNA, 13 bp, Artificial Sequence
  synthetic sequence
ttgatcttccacc

SEQ ID NO: 4961 - DNA, 13 bp, Artificial Sequence
  synthetic sequence
atgatttatctga

SEQ ID NO: 4962 - DNA, 13 bp, Artificial Sequence
  synthetic sequence
agctagtcaagta

SEQ ID NO: 4963 - DNA, 13 bp, Artificial Sequence
  synthetic sequence
cctgatgcaaggt

SEQ ID NO: 4964 - DNA, 13 bp, Artificial Sequence
  synthetic sequence
tggtgatccccag

SEQ ID NO: 4965 - DNA, 13 bp, Artificial Sequence
  synthetic sequence
ctttcctttatcc

SEQ ID NO: 4966 - DNA, 13 bp, Artificial Sequence
  synthetic sequence
attatcaagagaa

SEQ ID NO: 4967 - DNA, 13 bp, Artificial Sequence
  synthetic sequence
caatgacacagag

SEQ ID NO: 4968 - DNA, 13 bp, Artificial Sequence
  synthetic sequence
cctgttagatttc

SEQ ID NO: 4969 - DNA, 13 bp, Artificial Sequence
  synthetic sequence
gtgtgagtggctt

SEQ ID NO: 4970 - DNA, 13 bp, Artificial Sequence
  synthetic sequence
gtgtcatgatccc

SEQ ID NO: 4971 - DNA, 13 bp, Artificial Sequence
  synthetic sequence
gtgttgaacatta

SEQ ID NO: 4972 - DNA, 13 bp, Artificial Sequence
  synthetic sequence
caaccccaaaatg

SEQ ID NO: 4973 - DNA, 13 bp, Artificial Sequence
  synthetic sequence
tatgtgggcaaaa

SEQ ID NO: 4974 - DNA, 13 bp, Artificial Sequence
  synthetic sequence
ggtctatttcaac

SEQ ID NO: 4975 - DNA, 13 bp, Artificial Sequence
  synthetic sequence
aatctatttaaaa

SEQ ID NO: 4976 - DNA, 13 bp, Artificial Sequence
  synthetic sequence
gggtgaatccttg

SEQ ID NO: 4977 - DNA, 13 bp, Artificial Sequence
  synthetic sequence
atttgtcagattc

SEQ ID NO: 4978 - DNA, 13 bp, Artificial Sequence
  synthetic sequence
aattcttacctct

SEQ ID NO: 4979 - DNA, 13 bp, Artificial Sequence
  synthetic sequence
acatttatcctta

SEQ ID NO: 4980 - DNA, 13 bp, Artificial Sequence
  synthetic sequence
acaaaacatgacc

SEQ ID NO: 4981 - DNA, 13 bp, Artificial Sequence
  synthetic sequence
ttcaactcttatt

SEQ ID NO: 4982 - DNA, 13 bp, Artificial Sequence
  synthetic sequence
aaacaccaccaat

SEQ ID NO: 4983 - DNA, 13 bp, Artificial Sequence
  synthetic sequence
ccctctactctga

SEQ ID NO: 4984 - DNA, 13 bp, Artificial Sequence
  synthetic sequence
ttttagatacaag

SEQ ID NO: 4985 - DNA, 13 bp, Artificial Sequence
  synthetic sequence
tcaactcaactga

SEQ ID NO: 4986 - DNA, 13 bp, Artificial Sequence
  synthetic sequence
tctgatgcggtca

SEQ ID NO: 4987 - DNA, 13 bp, Artificial Sequence
  synthetic sequence
tgaatattcaaac

SEQ ID NO: 4988 - DNA, 13 bp, Artificial Sequence
  synthetic sequence
tctggagaacagg

SEQ ID NO: 4989 - DNA, 13 bp, Artificial Sequence
  synthetic sequence
caaatttatttaa

SEQ ID NO: 4990 - DNA, 13 bp, Artificial Sequence
  synthetic sequence
cctctagatattc

SEQ ID NO: 4991 - DNA, 13 bp, Artificial Sequence
  synthetic sequence
aatttctcttatc

SEQ ID NO: 4992 - DNA, 13 bp, Artificial Sequence
  synthetic sequence
caacccttatcgc

SEQ ID NO: 4993 - DNA, 13 bp, Artificial Sequence
  synthetic sequence
ggtttgctgacgt

SEQ ID NO: 4994 - DNA, 13 bp, Artificial Sequence
  synthetic sequence
tttagtatcctat

SEQ ID NO: 4995 - DNA, 13 bp, Artificial Sequence
  synthetic sequence
tatttgtcaaatt

SEQ ID NO: 4996 - DNA, 13 bp, Artificial Sequence
  synthetic sequence
tgtgaatggcttt

SEQ ID NO: 4997 - DNA, 13 bp, Artificial Sequence
  synthetic sequence
agcaataattgat

SEQ ID NO: 4998 - DNA, 13 bp, Artificial Sequence
  synthetic sequence
agctggataccat

SEQ ID NO: 4999 - DNA, 13 bp, Artificial Sequence
  synthetic sequence
tttccttggagca

SEQ ID NO: 5000 - DNA, 13 bp, Artificial Sequence
  synthetic sequence
tttcacatttgat

SEQ ID NO: 5001 - DNA, 13 bp, Artificial Sequence
  synthetic sequence
tcagaactcataa

SEQ ID NO: 5002 - DNA, 13 bp, Artificial Sequence
  synthetic sequence
atcaccccagttg

SEQ ID NO: 5003 - DNA, 13 bp, Artificial Sequence
  synthetic sequence
attaccctaaatg

SEQ ID NO: 5004 - DNA, 13 bp, Artificial Sequence
  synthetic sequence
tcccaatgattat

SEQ ID NO: 5005 - DNA, 13 bp, Artificial Sequence
  synthetic sequence
cataattttagat

SEQ ID NO: 5006 - DNA, 13 bp, Artificial Sequence
  synthetic sequence
aaagggggccgat

SEQ ID NO: 5007 - DNA, 13 bp, Artificial Sequence
  synthetic sequence
gttttagaaattg

SEQ ID NO: 5008 - DNA, 13 bp, Artificial Sequence
  synthetic sequence
gattcccaggaac

SEQ ID NO: 5009 - DNA, 13 bp, Artificial Sequence
  synthetic sequence
atacaatccccct

SEQ ID NO: 5010 - DNA, 13 bp, Artificial Sequence
  synthetic sequence
aactcacagaaat

SEQ ID NO: 5011 - DNA, 13 bp, Artificial Sequence
  synthetic sequence
tatttcaactcag

SEQ ID NO: 5012 - DNA, 13 bp, Artificial Sequence
  synthetic sequence
tcatattataagg

SEQ ID NO: 5013 - DNA, 13 bp, Artificial Sequence
  synthetic sequence
tgtcatggcccca

SEQ ID NO: 5014 - DNA, 13 bp, Artificial Sequence
  synthetic sequence
tctaactattcaa

SEQ ID NO: 5015 - DNA, 13 bp, Artificial Sequence
  synthetic sequence
accaataatgata

SEQ ID NO: 5016 - DNA, 13 bp, Artificial Sequence
  synthetic sequence
attcaaagataat

SEQ ID NO: 5017 - DNA, 13 bp, Artificial Sequence
  synthetic sequence
tctttaaaaatta

SEQ ID NO: 5018 - DNA, 13 bp, Artificial Sequence
  synthetic sequence
cctttatcctaat

SEQ ID NO: 5019 - DNA, 13 bp, Artificial Sequence
  synthetic sequence
aaacattaaatgg

SEQ ID NO: 5020 - DNA, 13 bp, Artificial Sequence
  synthetic sequence
agatatttattct

SEQ ID NO: 5021 - DNA, 13 bp, Artificial Sequence
  synthetic sequence
aaggatattgaga

SEQ ID NO: 5022 - DNA, 13 bp, Artificial Sequence
  synthetic sequence
gtttggctttatt

SEQ ID NO: 5023 - DNA, 13 bp, Artificial Sequence
  synthetic sequence
ccttctgagtgtc

SEQ ID NO: 5024 - DNA, 13 bp, Artificial Sequence
  synthetic sequence
gacaaaatgtcaa

SEQ ID NO: 5025 - DNA, 13 bp, Artificial Sequence
  synthetic sequence
ttgagtctaaatg

SEQ ID NO: 5026 - DNA, 13 bp, Artificial Sequence
  synthetic sequence
ggtcgaagataat

SEQ ID NO: 5027 - DNA, 13 bp, Artificial Sequence
  synthetic sequence
gtaaatttaatca

SEQ ID NO: 5028 - DNA, 13 bp, Artificial Sequence
  synthetic sequence
agacacggcatat

SEQ ID NO: 5029 - DNA, 13 bp, Artificial Sequence
  synthetic sequence
atgatgatttgtc

SEQ ID NO: 5030 - DNA, 13 bp, Artificial Sequence
  synthetic sequence
ctccattatatgc

SEQ ID NO: 5031 - DNA, 13 bp, Artificial Sequence
  synthetic sequence
ttgtaagacttgt

SEQ ID NO: 5032 - DNA, 13 bp, Artificial Sequence
  synthetic sequence
agccctttgtcta

SEQ ID NO: 5033 - DNA, 13 bp, Artificial Sequence
  synthetic sequence
aaaatattaagac

SEQ ID NO: 5034 - DNA, 13 bp, Artificial Sequence
  synthetic sequence
tgagccaccctca

SEQ ID NO: 5035 - DNA, 13 bp, Artificial Sequence
  synthetic sequence
tcatgtcacttct

SEQ ID NO: 5036 - DNA, 13 bp, Artificial Sequence
  synthetic sequence
aaaatactatcaa

SEQ ID NO: 5037 - DNA, 13 bp, Artificial Sequence
  synthetic sequence
taatatggggttt

SEQ ID NO: 5038 - DNA, 13 bp, Artificial Sequence
  synthetic sequence
tgatggttgttac

SEQ ID NO: 5039 - DNA, 13 bp, Artificial Sequence
  synthetic sequence
acacacagagcac

SEQ ID NO: 5040 - DNA, 13 bp, Artificial Sequence
  synthetic sequence
atcaattaagaac

SEQ ID NO: 5041 - DNA, 13 bp, Artificial Sequence
  synthetic sequence
tcaggtgtttggt

SEQ ID NO: 5042 - DNA, 13 bp, Artificial Sequence
  synthetic sequence
atcattgtgcctt

SEQ ID NO: 5043 - DNA, 13 bp, Artificial Sequence
  synthetic sequence
tacacaggtattc

SEQ ID NO: 5044 - DNA, 13 bp, Artificial Sequence
  synthetic sequence
ttgttgagaccct

SEQ ID NO: 5045 - DNA, 13 bp, Artificial Sequence
  synthetic sequence
aaaacatgaccaa

SEQ ID NO: 5046 - DNA, 13 bp, Artificial Sequence
  synthetic sequence
agtagtgcagaaa

SEQ ID NO: 5047 - DNA, 13 bp, Artificial Sequence
  synthetic sequence
ctttccaaagggc

SEQ ID NO: 5048 - DNA, 13 bp, Artificial Sequence
  synthetic sequence
aacatagaaaaca

SEQ ID NO: 5049 - DNA, 13 bp, Artificial Sequence
  synthetic sequence
atataattactca

SEQ ID NO: 5050 - DNA, 13 bp, Artificial Sequence
  synthetic sequence
gagctttatcctt

SEQ ID NO: 5051 - DNA, 13 bp, Artificial Sequence
  synthetic sequence
ggaaggcgacatg

SEQ ID NO: 5052 - DNA, 13 bp, Artificial Sequence
  synthetic sequence
ctaagtaaactca

SEQ ID NO: 5053 - DNA, 13 bp, Artificial Sequence
  synthetic sequence
tctgcataagaag

SEQ ID NO: 5054 - DNA, 13 bp, Artificial Sequence
  synthetic sequence
aattgcttattcc

SEQ ID NO: 5055 - DNA, 13 bp, Artificial Sequence
  synthetic sequence
tcacaaaaacaat

SEQ ID NO: 5056 - DNA, 13 bp, Artificial Sequence
  synthetic sequence
agatcaagaattg

SEQ ID NO: 5057 - DNA, 13 bp, Artificial Sequence
  synthetic sequence
ctcagttggatac

SEQ ID NO: 5058 - DNA, 13 bp, Artificial Sequence
  synthetic sequence
gatagctagtaac

SEQ ID NO: 5059 - DNA, 13 bp, Artificial Sequence
  synthetic sequence
agaccatcttaat

SEQ ID NO: 5060 - DNA, 13 bp, Artificial Sequence
  synthetic sequence
ccaaaacttgtcg

SEQ ID NO: 5061 - DNA, 13 bp, Artificial Sequence
  synthetic sequence
aaatagtataaat

SEQ ID NO: 5062 - DNA, 13 bp, Artificial Sequence
  synthetic sequence
catgacttgattc

SEQ ID NO: 5063 - DNA, 13 bp, Artificial Sequence
  synthetic sequence
taccggaacataa

SEQ ID NO: 5064 - DNA, 13 bp, Artificial Sequence
  synthetic sequence
ggctctcaaaaga

SEQ ID NO: 5065 - DNA, 13 bp, Artificial Sequence
  synthetic sequence
tggggaacaggaa

SEQ ID NO: 5066 - DNA, 13 bp, Artificial Sequence
  synthetic sequence
acccgattgttgc

SEQ ID NO: 5067 - DNA, 13 bp, Artificial Sequence
  synthetic sequence
tgttttgtgttac

SEQ ID NO: 5068 - DNA, 13 bp, Artificial Sequence
  synthetic sequence
taattcttttcta

SEQ ID NO: 5069 - DNA, 13 bp, Artificial Sequence
  synthetic sequence
cttgcacgtggat

SEQ ID NO: 5070 - DNA, 13 bp, Artificial Sequence
  synthetic sequence
ttacacttatatt

SEQ ID NO: 5071 - DNA, 13 bp, Artificial Sequence
  synthetic sequence
ttgttatacattg

SEQ ID NO: 5072 - DNA, 13 bp, Artificial Sequence
  synthetic sequence
gacctgtcaccaa

SEQ ID NO: 5073 - DNA, 13 bp, Artificial Sequence
  synthetic sequence
ccttgagtcaccc

SEQ ID NO: 5074 - DNA, 13 bp, Artificial Sequence
  synthetic sequence
agctgaggataga

SEQ ID NO: 5075 - DNA, 13 bp, Artificial Sequence
  synthetic sequence
ttattattctatt

SEQ ID NO: 5076 - DNA, 13 bp, Artificial Sequence
  synthetic sequence
tcatttacaacat

SEQ ID NO: 5077 - DNA, 13 bp, Artificial Sequence
  synthetic sequence
ctgtcccaacact

SEQ ID NO: 5078 - DNA, 13 bp, Artificial Sequence
  synthetic sequence
ctctccaataatt

SEQ ID NO: 5079 - DNA, 13 bp, Artificial Sequence
  synthetic sequence
ctgcatcacaatc

SEQ ID NO: 5080 - DNA, 13 bp, Artificial Sequence
  synthetic sequence
gattatattacta

SEQ ID NO: 5081 - DNA, 13 bp, Artificial Sequence
  synthetic sequence
agtgtttggacat

SEQ ID NO: 5082 - DNA, 13 bp, Artificial Sequence
  synthetic sequence
gattaattgcatc

SEQ ID NO: 5083 - DNA, 13 bp, Artificial Sequence
  synthetic sequence
gaaatgtttagtg

SEQ ID NO: 5084 - DNA, 13 bp, Artificial Sequence
  synthetic sequence
accctctttgtcc

SEQ ID NO: 5085 - DNA, 13 bp, Artificial Sequence
  synthetic sequence
caaatggatcatt

SEQ ID NO: 5086 - DNA, 13 bp, Artificial Sequence
  synthetic sequence
gcctgagcattct

SEQ ID NO: 5087 - DNA, 13 bp, Artificial Sequence
  synthetic sequence
ccttgtccttgcc

SEQ ID NO: 5088 - DNA, 13 bp, Artificial Sequence
  synthetic sequence
tgattatcctcat

SEQ ID NO: 5089 - DNA, 13 bp, Artificial Sequence
  synthetic sequence
cttttccagtcat

SEQ ID NO: 5090 - DNA, 13 bp, Artificial Sequence
  synthetic sequence
gtattggggagca

SEQ ID NO: 5091 - DNA, 13 bp, Artificial Sequence
  synthetic sequence
tcatcataatatg

SEQ ID NO: 5092 - DNA, 13 bp, Artificial Sequence
  synthetic sequence
agggagagttttt

SEQ ID NO: 5093 - DNA, 13 bp, Artificial Sequence
  synthetic sequence
ctaataaaaacac

SEQ ID NO: 5094 - DNA, 13 bp, Artificial Sequence
  synthetic sequence
agtaagaagtcaa

SEQ ID NO: 5095 - DNA, 13 bp, Artificial Sequence
  synthetic sequence
actctgcctaatc

SEQ ID NO: 5096 - DNA, 13 bp, Artificial Sequence
  synthetic sequence
ctatcaaaacaag

SEQ ID NO: 5097 - DNA, 13 bp, Artificial Sequence
  synthetic sequence
gcttgttgggcaa

SEQ ID NO: 5098 - DNA, 13 bp, Artificial Sequence
  synthetic sequence
aggattcacttaa

SEQ ID NO: 5099 - DNA, 13 bp, Artificial Sequence
  synthetic sequence
aacagttaattat

SEQ ID NO: 5100 - DNA, 13 bp, Artificial Sequence
  synthetic sequence
attcttcacacca

SEQ ID NO: 5101 - DNA, 13 bp, Artificial Sequence
  synthetic sequence
tctgagattcagt

SEQ ID NO: 5102 - DNA, 13 bp, Artificial Sequence
  synthetic sequence
aacttgctgtaag

SEQ ID NO: 5103 - DNA, 13 bp, Artificial Sequence
  synthetic sequence
gataaccctccta

SEQ ID NO: 5104 - DNA, 13 bp, Artificial Sequence
  synthetic sequence
ataatgattcttt

SEQ ID NO: 5105 - DNA, 13 bp, Artificial Sequence
  synthetic sequence
cttagaggtacaa

SEQ ID NO: 5106 - DNA, 13 bp, Artificial Sequence
  synthetic sequence
cttaatttcatca

SEQ ID NO: 5107 - DNA, 13 bp, Artificial Sequence
  synthetic sequence
catgttcctcccc

SEQ ID NO: 5108 - DNA, 13 bp, Artificial Sequence
  synthetic sequence
tacgacaaataca

SEQ ID NO: 5109 - DNA, 13 bp, Artificial Sequence
  synthetic sequence
actttaatatatc

SEQ ID NO: 5110 - DNA, 13 bp, Artificial Sequence
  synthetic sequence
gcaagttgtaacg

SEQ ID NO: 5111 - DNA, 13 bp, Artificial Sequence
  synthetic sequence
tacctctcaatga

SEQ ID NO: 5112 - DNA, 13 bp, Artificial Sequence
  synthetic sequence
atacagcagtgtt

SEQ ID NO: 5113 - DNA, 13 bp, Artificial Sequence
  synthetic sequence
actattaagttag

SEQ ID NO: 5114 - DNA, 13 bp, Artificial Sequence
  synthetic sequence
aagatatattttg

SEQ ID NO: 5115 - DNA, 13 bp, Artificial Sequence
  synthetic sequence
aaatgaagttctc

SEQ ID NO: 5116 - DNA, 13 bp, Artificial Sequence
  synthetic sequence
tgagtgggtgtgc

SEQ ID NO: 5117 - DNA, 13 bp, Artificial Sequence
  synthetic sequence
acggttctataat

SEQ ID NO: 5118 - DNA, 13 bp, Artificial Sequence
  synthetic sequence
ttggtcttgcggg

SEQ ID NO: 5119 - DNA, 13 bp, Artificial Sequence
  synthetic sequence
gctcaatttcatg

SEQ ID NO: 5120 - DNA, 13 bp, Artificial Sequence
  synthetic sequence
gttggattcgcat

SEQ ID NO: 5121 - DNA, 13 bp, Artificial Sequence
  synthetic sequence
agatttttataat

SEQ ID NO: 5122 - DNA, 13 bp, Artificial Sequence
  synthetic sequence
tcctcatcatcac

SEQ ID NO: 5123 - DNA, 13 bp, Artificial Sequence
  synthetic sequence
ttatacaacattc

SEQ ID NO: 5124 - DNA, 13 bp, Artificial Sequence
  synthetic sequence
tcgacaattttcg

SEQ ID NO: 5125 - DNA, 13 bp, Artificial Sequence
  synthetic sequence
tgagagtcagttg

SEQ ID NO: 5126 - DNA, 13 bp, Artificial Sequence
  synthetic sequence
ctttaaattaacc

SEQ ID NO: 5127 - DNA, 13 bp, Artificial Sequence
  synthetic sequence
gcagacattccct

SEQ ID NO: 5128 - DNA, 13 bp, Artificial Sequence
  synthetic sequence
aagggtccacacc

SEQ ID NO: 5129 - DNA, 13 bp, Artificial Sequence
  synthetic sequence
agtcatacggcaa

SEQ ID NO: 5130 - DNA, 13 bp, Artificial Sequence
  synthetic sequence
catgctaatttaa

SEQ ID NO: 5131 - DNA, 13 bp, Artificial Sequence
  synthetic sequence
tcacttgtcatca

SEQ ID NO: 5132 - DNA, 13 bp, Artificial Sequence
  synthetic sequence
caaaactgagcaa

SEQ ID NO: 5133 - DNA, 13 bp, Artificial Sequence
  synthetic sequence
aagtcgttaatga

SEQ ID NO: 5134 - DNA, 13 bp, Artificial Sequence
  synthetic sequence
caataatcactgt

SEQ ID NO: 5135 - DNA, 13 bp, Artificial Sequence
  synthetic sequence
tgttgagtagtcg

SEQ ID NO: 5136 - DNA, 13 bp, Artificial Sequence
  synthetic sequence
gttgtcaataaat

SEQ ID NO: 5137 - DNA, 13 bp, Artificial Sequence
  synthetic sequence
aaatactccttcc

SEQ ID NO: 5138 - DNA, 13 bp, Artificial Sequence
  synthetic sequence
ctaaatagttacc

SEQ ID NO: 5139 - DNA, 13 bp, Artificial Sequence
  synthetic sequence
tcagagtggataa

SEQ ID NO: 5140 - DNA, 13 bp, Artificial Sequence
  synthetic sequence
atagcaattttgc

SEQ ID NO: 5141 - DNA, 13 bp, Artificial Sequence
  synthetic sequence
atacaagatgttg

SEQ ID NO: 5142 - DNA, 13 bp, Artificial Sequence
  synthetic sequence
actttgtattaag

SEQ ID NO: 5143 - DNA, 13 bp, Artificial Sequence
  synthetic sequence
gaaccttgaagat

SEQ ID NO: 5144 - DNA, 13 bp, Artificial Sequence
  synthetic sequence
tatctatgttata

SEQ ID NO: 5145 - DNA, 13 bp, Artificial Sequence
  synthetic sequence
actgatcatctag

SEQ ID NO: 5146 - DNA, 13 bp, Artificial Sequence
  synthetic sequence
atcattgtccttt

SEQ ID NO: 5147 - DNA, 13 bp, Artificial Sequence
  synthetic sequence
ataaggtcctcat

SEQ ID NO: 5148 - DNA, 13 bp, Artificial Sequence
  synthetic sequence
attctgtcatagt

SEQ ID NO: 5149 - DNA, 13 bp, Artificial Sequence
  synthetic sequence
agatcctcaaagc

SEQ ID NO: 5150 - DNA, 13 bp, Artificial Sequence
  synthetic sequence
actgaaattattg

SEQ ID NO: 5151 - DNA, 13 bp, Artificial Sequence
  synthetic sequence
aagttgtaacgtg

SEQ ID NO: 5152 - DNA, 13 bp, Artificial Sequence
  synthetic sequence
cctgagaatcagt

SEQ ID NO: 5153 - DNA, 13 bp, Artificial Sequence
  synthetic sequence
ataccaaaaagag

SEQ ID NO: 5154 - DNA, 13 bp, Artificial Sequence
  synthetic sequence
ccttgcatgttcc

SEQ ID NO: 5155 - DNA, 13 bp, Artificial Sequence
  synthetic sequence
ctttaatcatgat

SEQ ID NO: 5156 - DNA, 13 bp, Artificial Sequence
  synthetic sequence
tcattgtaatact

SEQ ID NO: 5157 - DNA, 13 bp, Artificial Sequence
  synthetic sequence
ttagtgaagatac

SEQ ID NO: 5158 - DNA, 13 bp, Artificial Sequence
  synthetic sequence
cctattgtatttt

SEQ ID NO: 5159 - DNA, 13 bp, Artificial Sequence
  synthetic sequence
cttggtttccttc

SEQ ID NO: 5160 - DNA, 13 bp, Artificial Sequence
  synthetic sequence
atactgctcataa

SEQ ID NO: 5161 - DNA, 13 bp, Artificial Sequence
  synthetic sequence
taacaataattat

SEQ ID NO: 5162 - DNA, 13 bp, Artificial Sequence
  synthetic sequence
ctccccctttgag

SEQ ID NO: 5163 - DNA, 13 bp, Artificial Sequence
  synthetic sequence
aacttttggctgg

SEQ ID NO: 5164 - DNA, 13 bp, Artificial Sequence
  synthetic sequence
cgtactgcaataa

SEQ ID NO: 5165 - DNA, 13 bp, Artificial Sequence
  synthetic sequence
agtactgaggttg

SEQ ID NO: 5166 - DNA, 13 bp, Artificial Sequence
  synthetic sequence
tttttaacaccgt

SEQ ID NO: 5167 - DNA, 13 bp, Artificial Sequence
  synthetic sequence
tattagattagct

SEQ ID NO: 5168 - DNA, 13 bp, Artificial Sequence
  synthetic sequence
acccaattatctt

SEQ ID NO: 5169 - DNA, 13 bp, Artificial Sequence
  synthetic sequence
gtaaataaatgag

SEQ ID NO: 5170 - DNA, 13 bp, Artificial Sequence
  synthetic sequence
ttctccgggttta

SEQ ID NO: 5171 - DNA, 13 bp, Artificial Sequence
  synthetic sequence
tattgaagaatat

SEQ ID NO: 5172 - DNA, 13 bp, Artificial Sequence
  synthetic sequence
tcatatctattac

SEQ ID NO: 5173 - DNA, 13 bp, Artificial Sequence
  synthetic sequence
accatttatcacg

SEQ ID NO: 5174 - DNA, 13 bp, Artificial Sequence
  synthetic sequence
ataaacttaaaga

SEQ ID NO: 5175 - DNA, 13 bp, Artificial Sequence
  synthetic sequence
aagtcaatcatta

SEQ ID NO: 5176 - DNA, 13 bp, Artificial Sequence
  synthetic sequence
ctacttgaattta

SEQ ID NO: 5177 - DNA, 13 bp, Artificial Sequence
  synthetic sequence
ctcttaatctcat

SEQ ID NO: 5178 - DNA, 13 bp, Artificial Sequence
  synthetic sequence
gaatacttaagca

SEQ ID NO: 5179 - DNA, 13 bp, Artificial Sequence
  synthetic sequence
aagataaggattt

SEQ ID NO: 5180 - DNA, 13 bp, Artificial Sequence
  synthetic sequence
catttcgcttagg

SEQ ID NO: 5181 - DNA, 13 bp, Artificial Sequence
  synthetic sequence
atagaaacacagg

SEQ ID NO: 5182 - DNA, 13 bp, Artificial Sequence
  synthetic sequence
aatcttcccttta

SEQ ID NO: 5183 - DNA, 13 bp, Artificial Sequence
  synthetic sequence
gcacaattaaaaa

SEQ ID NO: 5184 - DNA, 13 bp, Artificial Sequence
  synthetic sequence
catttttaaccat

SEQ ID NO: 5185 - DNA, 13 bp, Artificial Sequence
  synthetic sequence
ttgcatccaaaag

SEQ ID NO: 5186 - DNA, 13 bp, Artificial Sequence
  synthetic sequence
ttttatcacttat

SEQ ID NO: 5187 - DNA, 13 bp, Artificial Sequence
  synthetic sequence
taagattggaata

SEQ ID NO: 5188 - DNA, 13 bp, Artificial Sequence
  synthetic sequence
tcatatggcaaaa

SEQ ID NO: 5189 - DNA, 13 bp, Artificial Sequence
  synthetic sequence
attcttaaaaagt

SEQ ID NO: 5190 - DNA, 13 bp, Artificial Sequence
  synthetic sequence
tatcgaagtggat

SEQ ID NO: 5191 - DNA, 13 bp, Artificial Sequence
  synthetic sequence
agaattgattgct

SEQ ID NO: 5192 - DNA, 13 bp, Artificial Sequence
  synthetic sequence
ggtgttgttagta

SEQ ID NO: 5193 - DNA, 13 bp, Artificial Sequence
  synthetic sequence
tccttccagtaaa

SEQ ID NO: 5194 - DNA, 13 bp, Artificial Sequence
  synthetic sequence
gaattgtttataa

SEQ ID NO: 5195 - DNA, 13 bp, Artificial Sequence
  synthetic sequence
atcaataatgttt

SEQ ID NO: 5196 - DNA, 13 bp, Artificial Sequence
  synthetic sequence
ttatgagcaataa

SEQ ID NO: 5197 - DNA, 13 bp, Artificial Sequence
  synthetic sequence
ccttcatagtcta

SEQ ID NO: 5198 - DNA, 13 bp, Artificial Sequence
  synthetic sequence
taaccgtgctgtg

SEQ ID NO: 5199 - DNA, 13 bp, Artificial Sequence
  synthetic sequence
tctcctgagagtc

SEQ ID NO: 5200 - DNA, 13 bp, Artificial Sequence
  synthetic sequence
cataatatgattt

SEQ ID NO: 5201 - DNA, 13 bp, Artificial Sequence
  synthetic sequence
gaattaagacaag

SEQ ID NO: 5202 - DNA, 13 bp, Artificial Sequence
  synthetic sequence
ctttgatggtcga

SEQ ID NO: 5203 - DNA, 13 bp, Artificial Sequence
  synthetic sequence
taagaccgataaa

SEQ ID NO: 5204 - DNA, 13 bp, Artificial Sequence
  synthetic sequence
tgaaaccatccac

SEQ ID NO: 5205 - DNA, 13 bp, Artificial Sequence
  synthetic sequence
atttttgtgctga

SEQ ID NO: 5206 - DNA, 13 bp, Artificial Sequence
  synthetic sequence
ataacgtagtttt

SEQ ID NO: 5207 - DNA, 13 bp, Artificial Sequence
  synthetic sequence
ctatctcatttga

SEQ ID NO: 5208 - DNA, 13 bp, Artificial Sequence
  synthetic sequence
atccttcaagatt

SEQ ID NO: 5209 - DNA, 13 bp, Artificial Sequence
  synthetic sequence
ttgaattaagata

SEQ ID NO: 5210 - DNA, 13 bp, Artificial Sequence
  synthetic sequence
ttgttgcatgtat

SEQ ID NO: 5211 - DNA, 13 bp, Artificial Sequence
  synthetic sequence
tattagggagcat

SEQ ID NO: 5212 - DNA, 13 bp, Artificial Sequence
  synthetic sequence
tgaggtcctcatc

SEQ ID NO: 5213 - DNA, 13 bp, Artificial Sequence
  synthetic sequence
atcaaagatagag

SEQ ID NO: 5214 - DNA, 13 bp, Artificial Sequence
  synthetic sequence
cgcgcatattgag

SEQ ID NO: 5215 - DNA, 13 bp, Artificial Sequence
  synthetic sequence
acaagtcggcatg

SEQ ID NO: 5216 - DNA, 13 bp, Artificial Sequence
  synthetic sequence
ggccacactttta

SEQ ID NO: 5217 - DNA, 13 bp, Artificial Sequence
  synthetic sequence
gcaaatgagacaa

SEQ ID NO: 5218 - DNA, 13 bp, Artificial Sequence
  synthetic sequence
ttgctgcaggggg

SEQ ID NO: 5219 - DNA, 13 bp, Artificial Sequence
  synthetic sequence
tcctctacaggga

SEQ ID NO: 5220 - DNA, 13 bp, Artificial Sequence
  synthetic sequence
aaaaacttaggaa

SEQ ID NO: 5221 - DNA, 13 bp, Artificial Sequence
  synthetic sequence
tgtggatattggc

SEQ ID NO: 5222 - DNA, 13 bp, Artificial Sequence
  synthetic sequence
cttcacaatcaat

SEQ ID NO: 5223 - DNA, 13 bp, Artificial Sequence
  synthetic sequence
cagataattgaat

SEQ ID NO: 5224 - DNA, 13 bp, Artificial Sequence
  synthetic sequence
gaagggtattgtc

SEQ ID NO: 5225 - DNA, 13 bp, Artificial Sequence
  synthetic sequence
ccattaaaaaggg

SEQ ID NO: 5226 - DNA, 13 bp, Artificial Sequence
  synthetic sequence
tgcccaatataac

SEQ ID NO: 5227 - DNA, 13 bp, Artificial Sequence
  synthetic sequence
aacttagggtgca

SEQ ID NO: 5228 - DNA, 13 bp, Artificial Sequence
  synthetic sequence
atgcttcacatgg

SEQ ID NO: 5229 - DNA, 13 bp, Artificial Sequence
  synthetic sequence
aaggcagaggcta

SEQ ID NO: 5230 - DNA, 13 bp, Artificial Sequence
  synthetic sequence
acacaactgtgtg

SEQ ID NO: 5231 - DNA, 13 bp, Artificial Sequence
  synthetic sequence
cagagtcctactt

SEQ ID NO: 5232 - DNA, 13 bp, Artificial Sequence
  synthetic sequence
tatacagaaatcc

SEQ ID NO: 5233 - DNA, 13 bp, Artificial Sequence
  synthetic sequence
ccagtcttcacat

SEQ ID NO: 5234 - DNA, 13 bp, Artificial Sequence
  synthetic sequence
gaggaattggcag

SEQ ID NO: 5235 - DNA, 13 bp, Artificial Sequence
  synthetic sequence
accacaatctcca

SEQ ID NO: 5236 - DNA, 13 bp, Artificial Sequence
  synthetic sequence
tgaaacccatcat

SEQ ID NO: 5237 - DNA, 13 bp, Artificial Sequence
  synthetic sequence
tttacggccttga

SEQ ID NO: 5238 - DNA, 13 bp, Artificial Sequence
  synthetic sequence
gttcctgcgttac

SEQ ID NO: 5239 - DNA, 13 bp, Artificial Sequence
  synthetic sequence
ccactgagcttga

SEQ ID NO: 5240 - DNA, 13 bp, Artificial Sequence
  synthetic sequence
tccataaaagcct

SEQ ID NO: 5241 - DNA, 13 bp, Artificial Sequence
  synthetic sequence
tgtacccgatgag

SEQ ID NO: 5242 - DNA, 13 bp, Artificial Sequence
  synthetic sequence
tgggatggccaag

SEQ ID NO: 5243 - DNA, 13 bp, Artificial Sequence
  synthetic sequence
atgtggctgctga

SEQ ID NO: 5244 - DNA, 13 bp, Artificial Sequence
  synthetic sequence
ccatccaagtcgg

SEQ ID NO: 5245 - DNA, 13 bp, Artificial Sequence
  synthetic sequence
agcaattggatca

SEQ ID NO: 5246 - DNA, 13 bp, Artificial Sequence
  synthetic sequence
ccaacccattgat

SEQ ID NO: 5247 - DNA, 13 bp, Artificial Sequence
  synthetic sequence
gttgggaatgtca

SEQ ID NO: 5248 - DNA, 13 bp, Artificial Sequence
  synthetic sequence
gtgatcaatccag

SEQ ID NO: 5249 - DNA, 13 bp, Artificial Sequence
  synthetic sequence
ttggatgtggtga

SEQ ID NO: 5250 - DNA, 13 bp, Artificial Sequence
  synthetic sequence
ccaattctagatc

SEQ ID NO: 5251 - DNA, 13 bp, Artificial Sequence
  synthetic sequence
aatgctggaattc

SEQ ID NO: 5252 - DNA, 13 bp, Artificial Sequence
  synthetic sequence
aactcggtatcac

SEQ ID NO: 5253 - DNA, 13 bp, Artificial Sequence
  synthetic sequence
tgatgatgagctg

SEQ ID NO: 5254 - DNA, 13 bp, Artificial Sequence
  synthetic sequence
atgtcatagaggg

SEQ ID NO: 5255 - DNA, 13 bp, Artificial Sequence
  synthetic sequence
tcaaggttagtcc

SEQ ID NO: 5256 - DNA, 13 bp, Artificial Sequence
  synthetic sequence
gactcttcattcc

SEQ ID NO: 5257 - DNA, 13 bp, Artificial Sequence
  synthetic sequence
ctcaaagatatca

SEQ ID NO: 5258 - DNA, 13 bp, Artificial Sequence
  synthetic sequence
ttcactatctact

SEQ ID NO: 5259 - DNA, 13 bp, Artificial Sequence
  synthetic sequence
ctgaccctccccc

SEQ ID NO: 5260 - DNA, 13 bp, Artificial Sequence
  synthetic sequence
ggtttgagccctt

SEQ ID NO: 5261 - DNA, 13 bp, Artificial Sequence
  synthetic sequence
ttgacactgcatc

SEQ ID NO: 5262 - DNA, 13 bp, Artificial Sequence
  synthetic sequence
acagtcagtgcat

SEQ ID NO: 5263 - DNA, 13 bp, Artificial Sequence
  synthetic sequence
ggatcagggaaag

SEQ ID NO: 5264 - DNA, 13 bp, Artificial Sequence
  synthetic sequence
gatgaatctttac

SEQ ID NO: 5265 - DNA, 13 bp, Artificial Sequence
  synthetic sequence
atgaaatcctgga

SEQ ID NO: 5266 - DNA, 13 bp, Artificial Sequence
  synthetic sequence
agaatagcaacag

SEQ ID NO: 5267 - DNA, 13 bp, Artificial Sequence
  synthetic sequence
ttgaaggataaca

SEQ ID NO: 5268 - DNA, 13 bp, Artificial Sequence
  synthetic sequence
ctgatgaaggtac

SEQ ID NO: 5269 - DNA, 13 bp, Artificial Sequence
  synthetic sequence
ccacagctgctca

SEQ ID NO: 5270 - DNA, 13 bp, Artificial Sequence
  synthetic sequence
aaagcctaatctg

SEQ ID NO: 5271 - DNA, 13 bp, Artificial Sequence
  synthetic sequence
tggaccggttggt

SEQ ID NO: 5272 - DNA, 13 bp, Artificial Sequence
  synthetic sequence
tgggtaaggatag

SEQ ID NO: 5273 - DNA, 13 bp, Artificial Sequence
  synthetic sequence
agtgcccagcaat

SEQ ID NO: 5274 - DNA, 13 bp, Artificial Sequence
  synthetic sequence
cctaaaggagaca

SEQ ID NO: 5275 - DNA, 13 bp, Artificial Sequence
  synthetic sequence
cctgggccaccag

SEQ ID NO: 5276 - DNA, 13 bp, Artificial Sequence
  synthetic sequence
agaccaccaaccg

SEQ ID NO: 5277 - DNA, 13 bp, Artificial Sequence
  synthetic sequence
ggagacaccggga

SEQ ID NO: 5278 - DNA, 13 bp, Artificial Sequence
  synthetic sequence
tagaccgtagtgc

SEQ ID NO: 5279 - DNA, 13 bp, Artificial Sequence
  synthetic sequence
cctaggcgttgcc

SEQ ID NO: 5280 - DNA, 13 bp, Artificial Sequence
  synthetic sequence
gaacttacctagt

SEQ ID NO: 5281 - DNA, 13 bp, Artificial Sequence
  synthetic sequence
tggaccgattggt

SEQ ID NO: 5282 - DNA, 13 bp, Artificial Sequence
  synthetic sequence
cttatcatgagtt

SEQ ID NO: 5283 - DNA, 13 bp, Artificial Sequence
  synthetic sequence
gcgatctgccgtt

SEQ ID NO: 5284 - DNA, 13 bp, Artificial Sequence
  synthetic sequence
ccagaccaccctg

SEQ ID NO: 5285 - DNA, 13 bp, Artificial Sequence
  synthetic sequence
cctagatcacagt

SEQ ID NO: 5286 - DNA, 13 bp, Artificial Sequence
  synthetic sequence
agtgggcaccgtt

SEQ ID NO: 5287 - DNA, 13 bp, Artificial Sequence
  synthetic sequence
tgacagagatcta

SEQ ID NO: 5288 - DNA, 13 bp, Artificial Sequence
  synthetic sequence
caaatgggggaaa

SEQ ID NO: 5289 - DNA, 13 bp, Artificial Sequence
  synthetic sequence
tcagggaaaggtg

SEQ ID NO: 5290 - DNA, 13 bp, Artificial Sequence
  synthetic sequence
acttaggattcaa

SEQ ID NO: 5291 - DNA, 13 bp, Artificial Sequence
  synthetic sequence
caactccccaccc

SEQ ID NO: 5292 - DNA, 13 bp, Artificial Sequence
  synthetic sequence
gtttacatgcata

SEQ ID NO: 5293 - DNA, 13 bp, Artificial Sequence
  synthetic sequence
ttctgtagaccgc

SEQ ID NO: 5294 - DNA, 13 bp, Artificial Sequence
  synthetic sequence
atccggagaatat

SEQ ID NO: 5295 - DNA, 13 bp, Artificial Sequence
  synthetic sequence
gcacacccctaga

SEQ ID NO: 5296 - DNA, 13 bp, Artificial Sequence
  synthetic sequence
gggccaccagctc

SEQ ID NO: 5297 - DNA, 13 bp, Artificial Sequence
  synthetic sequence
caagcaagcacaa

SEQ ID NO: 5298 - DNA, 13 bp, Artificial Sequence
  synthetic sequence
atcaggattaaga

SEQ ID NO: 5299 - DNA, 13 bp, Artificial Sequence
  synthetic sequence
cggaggcagttgg

SEQ ID NO: 5300 - DNA, 13 bp, Artificial Sequence
  synthetic sequence
ccggacacagacc

SEQ ID NO: 5301 - DNA, 13 bp, Artificial Sequence
  synthetic sequence
tatagagccaaga

SEQ ID NO: 5302 - DNA, 13 bp, Artificial Sequence
  synthetic sequence
taaggaagcaggc

SEQ ID NO: 5303 - DNA, 13 bp, Artificial Sequence
  synthetic sequence
gcactgtatccga

SEQ ID NO: 5304 - DNA, 13 bp, Artificial Sequence
  synthetic sequence
gactatagatgac

SEQ ID NO: 5305 - DNA, 13 bp, Artificial Sequence
  synthetic sequence
cagcaaattcatg

SEQ ID NO: 5306 - DNA, 13 bp, Artificial Sequence
  synthetic sequence
ggattacactgcg

SEQ ID NO: 5307 - DNA, 13 bp, Artificial Sequence
  synthetic sequence
gatagagtcagca

SEQ ID NO: 5308 - DNA, 13 bp, Artificial Sequence
  synthetic sequence
ttctttgttgggt

SEQ ID NO: 5309 - DNA, 13 bp, Artificial Sequence
  synthetic sequence
agttttgtttagt

SEQ ID NO: 5310 - DNA, 13 bp, Artificial Sequence
  synthetic sequence
gcaaatctcttgt

SEQ ID NO: 5311 - DNA, 13 bp, Artificial Sequence
  synthetic sequence
cactttgctccta

SEQ ID NO: 5312 - DNA, 13 bp, Artificial Sequence
  synthetic sequence
aagcatgtctcca

SEQ ID NO: 5313 - DNA, 13 bp, Artificial Sequence
  synthetic sequence
acgggtgatgctc

SEQ ID NO: 5314 - DNA, 13 bp, Artificial Sequence
  synthetic sequence
cattattctggga

SEQ ID NO: 5315 - DNA, 13 bp, Artificial Sequence
  synthetic sequence
ttcgacatctgca

SEQ ID NO: 5316 - DNA, 13 bp, Artificial Sequence
  synthetic sequence
gcctcatcctcca

SEQ ID NO: 5317 - DNA, 13 bp, Artificial Sequence
  synthetic sequence
ctggcatgaaagt

SEQ ID NO: 5318 - DNA, 13 bp, Artificial Sequence
  synthetic sequence
cactccaatgtgt

SEQ ID NO: 5319 - DNA, 13 bp, Artificial Sequence
  synthetic sequence
tgcaatcaggatg

SEQ ID NO: 5320 - DNA, 13 bp, Artificial Sequence
  synthetic sequence
cggcagcaatgta

SEQ ID NO: 5321 - DNA, 13 bp, Artificial Sequence
  synthetic sequence
aatgctcgcccga

SEQ ID NO: 5322 - DNA, 13 bp, Artificial Sequence
  synthetic sequence
ctctcatcagtgg

SEQ ID NO: 5323 - DNA, 13 bp, Artificial Sequence
  synthetic sequence
cttaacgaagata

SEQ ID NO: 5324 - DNA, 13 bp, Artificial Sequence
  synthetic sequence
tgagtatttcact

SEQ ID NO: 5325 - DNA, 13 bp, Artificial Sequence
  synthetic sequence
gcatgacctttca

SEQ ID NO: 5326 - DNA, 13 bp, Artificial Sequence
  synthetic sequence
cgtgagttatccg

SEQ ID NO: 5327 - DNA, 13 bp, Artificial Sequence
  synthetic sequence
ggtcataacctct

SEQ ID NO: 5328 - DNA, 13 bp, Artificial Sequence
  synthetic sequence
gaatcattctctt

SEQ ID NO: 5329 - DNA, 13 bp, Artificial Sequence
  synthetic sequence
gaggcaacatcat

SEQ ID NO: 5330 - DNA, 13 bp, Artificial Sequence
  synthetic sequence
ctttgcctaagaa

SEQ ID NO: 5331 - DNA, 13 bp, Artificial Sequence
  synthetic sequence
gaactgcctgcct

SEQ ID NO: 5332 - DNA, 13 bp, Artificial Sequence
  synthetic sequence
atacatgttgaga

SEQ ID NO: 5333 - DNA, 13 bp, Artificial Sequence
  synthetic sequence
gctgccctaggta

SEQ ID NO: 5334 - DNA, 13 bp, Artificial Sequence
  synthetic sequence
atcatttatgatc

SEQ ID NO: 5335 - DNA, 13 bp, Artificial Sequence
  synthetic sequence
gcttgggctgtaa

SEQ ID NO: 5336 - DNA, 13 bp, Artificial Sequence
  synthetic sequence
agagcagcaagtg

SEQ ID NO: 5337 - DNA, 13 bp, Artificial Sequence
  synthetic sequence
gtggaactgacct

SEQ ID NO: 5338 - DNA, 13 bp, Artificial Sequence
  synthetic sequence
tatggcttcttag

SEQ ID NO: 5339 - DNA, 13 bp, Artificial Sequence
  synthetic sequence
ctgcacatttctc

SEQ ID NO: 5340 - DNA, 13 bp, Artificial Sequence
  synthetic sequence
aagtgagatctct

SEQ ID NO: 5341 - DNA, 13 bp, Artificial Sequence
  synthetic sequence
gttatgaaactat

SEQ ID NO: 5342 - DNA, 13 bp, Artificial Sequence
  synthetic sequence
tccttgatgtcct

SEQ ID NO: 5343 - DNA, 13 bp, Artificial Sequence
  synthetic sequence
cacttgtttagtt

SEQ ID NO: 5344 - DNA, 13 bp, Artificial Sequence
  synthetic sequence
aggtctctatatc

SEQ ID NO: 5345 - DNA, 13 bp, Artificial Sequence
  synthetic sequence
taaagcagtggtt

SEQ ID NO: 5346 - DNA, 13 bp, Artificial Sequence
  synthetic sequence
aggcggtgcttga

SEQ ID NO: 5347 - DNA, 13 bp, Artificial Sequence
  synthetic sequence
ctaatgcctgcaa

SEQ ID NO: 5348 - DNA, 13 bp, Artificial Sequence
  synthetic sequence
tacatagctctgc

SEQ ID NO: 5349 - DNA, 13 bp, Artificial Sequence
  synthetic sequence
caatgatggaggg

SEQ ID NO: 5350 - DNA, 13 bp, Artificial Sequence
  synthetic sequence
cattttgtaagtc

SEQ ID NO: 5351 - DNA, 13 bp, Artificial Sequence
  synthetic sequence
ttaatcttttcag

SEQ ID NO: 5352 - DNA, 13 bp, Artificial Sequence
  synthetic sequence
ttatgactaatga

SEQ ID NO: 5353 - DNA, 13 bp, Artificial Sequence
  synthetic sequence
ttttggtcccttc

SEQ ID NO: 5354 - DNA, 13 bp, Artificial Sequence
  synthetic sequence
tggataggctcta

SEQ ID NO: 5355 - DNA, 13 bp, Artificial Sequence
  synthetic sequence
gggactttgcata

SEQ ID NO: 5356 - DNA, 13 bp, Artificial Sequence
  synthetic sequence
atgcctgatgtct

SEQ ID NO: 5357 - DNA, 13 bp, Artificial Sequence
  synthetic sequence
cccatcttttcga

SEQ ID NO: 5358 - DNA, 13 bp, Artificial Sequence
  synthetic sequence
cttcgtattttca

SEQ ID NO: 5359 - DNA, 13 bp, Artificial Sequence
  synthetic sequence
gaacattgagagt

SEQ ID NO: 5360 - DNA, 13 bp, Artificial Sequence
  synthetic sequence
ctataaacccttt

SEQ ID NO: 5361 - DNA, 13 bp, Artificial Sequence
  synthetic sequence
ttaaatcacaaga

SEQ ID NO: 5362 - DNA, 13 bp, Artificial Sequence
  synthetic sequence
gggaagccggaga

SEQ ID NO: 5363 - DNA, 13 bp, Artificial Sequence
  synthetic sequence
gaattgtgataga

SEQ ID NO: 5364 - DNA, 13 bp, Artificial Sequence
  synthetic sequence
ctctccctggctt

SEQ ID NO: 5365 - DNA, 13 bp, Artificial Sequence
  synthetic sequence
ctgaaatccttga

SEQ ID NO: 5366 - DNA, 13 bp, Artificial Sequence
  synthetic sequence
ccttaatgctcat

SEQ ID NO: 5367 - DNA, 13 bp, Artificial Sequence
  synthetic sequence
catcacttgctct

SEQ ID NO: 5368 - DNA, 13 bp, Artificial Sequence
  synthetic sequence
tgacaaagggctg

SEQ ID NO: 5369 - DNA, 13 bp, Artificial Sequence
  synthetic sequence
ggttgccgtggtc

SEQ ID NO: 5370 - DNA, 13 bp, Artificial Sequence
  synthetic sequence
cgattagatcaca

SEQ ID NO: 5371 - DNA, 13 bp, Artificial Sequence
  synthetic sequence
ggggacattgaga

SEQ ID NO: 5372 - DNA, 13 bp, Artificial Sequence
  synthetic sequence
ttcattttgcaat

SEQ ID NO: 5373 - DNA, 13 bp, Artificial Sequence
  synthetic sequence
ggggatgacgcag

SEQ ID NO: 5374 - DNA, 13 bp, Artificial Sequence
  synthetic sequence
gaattacttgagg

SEQ ID NO: 5375 - DNA, 13 bp, Artificial Sequence
  synthetic sequence
tgatgctggatgc

SEQ ID NO: 5376 - DNA, 13 bp, Artificial Sequence
  synthetic sequence
tgaaatcatgttg

SEQ ID NO: 5377 - DNA, 13 bp, Artificial Sequence
  synthetic sequence
ataacgggatatg

SEQ ID NO: 5378 - DNA, 13 bp, Artificial Sequence
  synthetic sequence
ctcatatttgaga

SEQ ID NO: 5379 - DNA, 13 bp, Artificial Sequence
  synthetic sequence
tggaacgagtcat

SEQ ID NO: 5380 - DNA, 13 bp, Artificial Sequence
  synthetic sequence
ataataccacaat

SEQ ID NO: 5381 - DNA, 13 bp, Artificial Sequence
  synthetic sequence
attctgccgaatt

SEQ ID NO: 5382 - DNA, 13 bp, Artificial Sequence
  synthetic sequence
ggatgttgttctg

SEQ ID NO: 5383 - DNA, 13 bp, Artificial Sequence
  synthetic sequence
tgggcttgatgct

SEQ ID NO: 5384 - DNA, 13 bp, Artificial Sequence
  synthetic sequence
ggtggattgatct

SEQ ID NO: 5385 - DNA, 13 bp, Artificial Sequence
  synthetic sequence
ctaaaaggataaa

SEQ ID NO: 5386 - DNA, 13 bp, Artificial Sequence
  synthetic sequence
gctctcatcttgt

SEQ ID NO: 5387 - DNA, 13 bp, Artificial Sequence
  synthetic sequence
atcagccatcctt

SEQ ID NO: 5388 - DNA, 13 bp, Artificial Sequence
  synthetic sequence
tggaaccaaggcc

SEQ ID NO: 5389 - DNA, 13 bp, Artificial Sequence
  synthetic sequence
agggctcagctgc

SEQ ID NO: 5390 - DNA, 13 bp, Artificial Sequence
  synthetic sequence
ccttacgagatgg

SEQ ID NO: 5391 - DNA, 13 bp, Artificial Sequence
  synthetic sequence
gctgggcctttga

SEQ ID NO: 5392 - DNA, 13 bp, Artificial Sequence
  synthetic sequence
cagcaagctcagt

SEQ ID NO: 5393 - DNA, 13 bp, Artificial Sequence
  synthetic sequence
ctggattctatag

SEQ ID NO: 5394 - DNA, 13 bp, Artificial Sequence
  synthetic sequence
aatcctttttcag

SEQ ID NO: 5395 - DNA, 13 bp, Artificial Sequence
  synthetic sequence
tttgttcacgatt

SEQ ID NO: 5396 - DNA, 13 bp, Artificial Sequence
  synthetic sequence
ctgttgttcttta

SEQ ID NO: 5397 - DNA, 13 bp, Artificial Sequence
  synthetic sequence
tgaagaaggagct

SEQ ID NO: 5398 - DNA, 13 bp, Artificial Sequence
  synthetic sequence
ggtgttgtgtcat

SEQ ID NO: 5399 - DNA, 13 bp, Artificial Sequence
  synthetic sequence
caactgaagagtt

SEQ ID NO: 5400 - DNA, 13 bp, Artificial Sequence
  synthetic sequence
gctgcctccctgg

SEQ ID NO: 5401 - DNA, 13 bp, Artificial Sequence
  synthetic sequence
tatcaggtccatc

SEQ ID NO: 5402 - DNA, 13 bp, Artificial Sequence
  synthetic sequence
aagctacagctaa

SEQ ID NO: 5403 - DNA, 13 bp, Artificial Sequence
  synthetic sequence
ttccatgggcctt

SEQ ID NO: 5404 - DNA, 13 bp, Artificial Sequence
  synthetic sequence
tgaggcagataga

SEQ ID NO: 5405 - DNA, 13 bp, Artificial Sequence
  synthetic sequence
taggaatttcttt

SEQ ID NO: 5406 - DNA, 13 bp, Artificial Sequence
  synthetic sequence
acaggtcggtgct

SEQ ID NO: 5407 - DNA, 13 bp, Artificial Sequence
  synthetic sequence
aatctgtgtttcc

SEQ ID NO: 5408 - DNA, 13 bp, Artificial Sequence
  synthetic sequence
tctatggacagaa

SEQ ID NO: 5409 - DNA, 13 bp, Artificial Sequence
  synthetic sequence
tagctgctttagg

SEQ ID NO: 5410 - DNA, 13 bp, Artificial Sequence
  synthetic sequence
tcagatgtcatca

SEQ ID NO: 5411 - DNA, 13 bp, Artificial Sequence
  synthetic sequence
ttaaggagcctct

SEQ ID NO: 5412 - DNA, 13 bp, Artificial Sequence
  synthetic sequence
aagggtgacatgt

SEQ ID NO: 5413 - DNA, 13 bp, Artificial Sequence
  synthetic sequence
gatatgtgagggg

SEQ ID NO: 5414 - DNA, 13 bp, Artificial Sequence
  synthetic sequence
agcagagaaatgt

SEQ ID NO: 5415 - DNA, 13 bp, Artificial Sequence
  synthetic sequence
atgatagtgtcta

SEQ ID NO: 5416 - DNA, 13 bp, Artificial Sequence
  synthetic sequence
ttccaacatttga

SEQ ID NO: 5417 - DNA, 13 bp, Artificial Sequence
  synthetic sequence
catctaaatatgg

SEQ ID NO: 5418 - DNA, 13 bp, Artificial Sequence
  synthetic sequence
gctcacaccccac

SEQ ID NO: 5419 - DNA, 13 bp, Artificial Sequence
  synthetic sequence
gtcatcagactga

SEQ ID NO: 5420 - DNA, 13 bp, Artificial Sequence
  synthetic sequence
tgcatatttgttt

SEQ ID NO: 5421 - DNA, 13 bp, Artificial Sequence
  synthetic sequence
aaaaatgaaaggg

SEQ ID NO: 5422 - DNA, 13 bp, Artificial Sequence
  synthetic sequence
tgcatagtgtgtg

SEQ ID NO: 5423 - DNA, 13 bp, Artificial Sequence
  synthetic sequence
taggatggatgga

SEQ ID NO: 5424 - DNA, 13 bp, Artificial Sequence
  synthetic sequence
agttggtttggag

SEQ ID NO: 5425 - DNA, 13 bp, Artificial Sequence
  synthetic sequence
agggtatgcaatt

SEQ ID NO: 5426 - DNA, 13 bp, Artificial Sequence
  synthetic sequence
ttgtccgatcaac

SEQ ID NO: 5427 - DNA, 13 bp, Artificial Sequence
  synthetic sequence
aagaagtgcactg

SEQ ID NO: 5428 - DNA, 13 bp, Artificial Sequence
  synthetic sequence
agacaaggaatga

SEQ ID NO: 5429 - DNA, 13 bp, Artificial Sequence
  synthetic sequence
aaagccatcattg

SEQ ID NO: 5430 - DNA, 13 bp, Artificial Sequence
  synthetic sequence
gtgatgaagacac

SEQ ID NO: 5431 - DNA, 13 bp, Artificial Sequence
  synthetic sequence
gtggaggatgggg

SEQ ID NO: 5432 - DNA, 13 bp, Artificial Sequence
  synthetic sequence
ctctgcatatagt

SEQ ID NO: 5433 - DNA, 13 bp, Artificial Sequence
  synthetic sequence
atctcagaaacag

SEQ ID NO: 5434 - DNA, 13 bp, Artificial Sequence
  synthetic sequence
aagggggtcaagg

SEQ ID NO: 5435 - DNA, 13 bp, Artificial Sequence
  synthetic sequence
acaaagacggtgc

SEQ ID NO: 5436 - DNA, 13 bp, Artificial Sequence
  synthetic sequence
aaaccaagttctt

SEQ ID NO: 5437 - DNA, 13 bp, Artificial Sequence
  synthetic sequence
gaccagggaaggg

SEQ ID NO: 5438 - DNA, 13 bp, Artificial Sequence
  synthetic sequence
ggttattagagtg

SEQ ID NO: 5439 - DNA, 13 bp, Artificial Sequence
  synthetic sequence
ggaccaaacaaag

SEQ ID NO: 5440 - DNA, 13 bp, Artificial Sequence
  synthetic sequence
gcttcaatgtgaa

SEQ ID NO: 5441 - DNA, 13 bp, Artificial Sequence
  synthetic sequence
gggacaaaagatc

SEQ ID NO: 5442 - DNA, 13 bp, Artificial Sequence
  synthetic sequence
aaagagaaactcg

SEQ ID NO: 5443 - DNA, 13 bp, Artificial Sequence
  synthetic sequence
agccaggaattat

SEQ ID NO: 5444 - DNA, 13 bp, Artificial Sequence
  synthetic sequence
ccctagtgcttat

SEQ ID NO: 5445 - DNA, 13 bp, Artificial Sequence
  synthetic sequence
tgatggggagaaa

SEQ ID NO: 5446 - DNA, 13 bp, Artificial Sequence
  synthetic sequence
ctcctcttctcat

SEQ ID NO: 5447 - DNA, 13 bp, Artificial Sequence
  synthetic sequence
cttggagactttg

SEQ ID NO: 5448 - DNA, 13 bp, Artificial Sequence
  synthetic sequence
actcctttgttgg

SEQ ID NO: 5449 - DNA, 13 bp, Artificial Sequence
  synthetic sequence
ggtatgcagggga

SEQ ID NO: 5450 - DNA, 13 bp, Artificial Sequence
  synthetic sequence
cgtccatggttgt

SEQ ID NO: 5451 - DNA, 13 bp, Artificial Sequence
  synthetic sequence
gactttgcatcaa

SEQ ID NO: 5452 - DNA, 13 bp, Artificial Sequence
  synthetic sequence
atgatctagagga

SEQ ID NO: 5453 - DNA, 13 bp, Artificial Sequence
  synthetic sequence
aaagctttcaaga

SEQ ID NO: 5454 - DNA, 13 bp, Artificial Sequence
  synthetic sequence
gtagcactatgct

SEQ ID NO: 5455 - DNA, 13 bp, Artificial Sequence
  synthetic sequence
tcacccagcagtt

SEQ ID NO: 5456 - DNA, 13 bp, Artificial Sequence
  synthetic sequence
tctgggcctgttc

SEQ ID NO: 5457 - DNA, 13 bp, Artificial Sequence
  synthetic sequence
ggaagctgattag

SEQ ID NO: 5458 - DNA, 13 bp, Artificial Sequence
  synthetic sequence
catccttcttctt

SEQ ID NO: 5459 - DNA, 13 bp, Artificial Sequence
  synthetic sequence
gatccatcacaaa

SEQ ID NO: 5460 - DNA, 13 bp, Artificial Sequence
  synthetic sequence
ggttgtcttctgc

SEQ ID NO: 5461 - DNA, 13 bp, Artificial Sequence
  synthetic sequence
acacaggcccctt

SEQ ID NO: 5462 - DNA, 13 bp, Artificial Sequence
  synthetic sequence
gaacctcatactt

SEQ ID NO: 5463 - DNA, 13 bp, Artificial Sequence
  synthetic sequence
aactcatgcattc

SEQ ID NO: 5464 - DNA, 13 bp, Artificial Sequence
  synthetic sequence
aattttctttagc

SEQ ID NO: 5465 - DNA, 13 bp, Artificial Sequence
  synthetic sequence
gaataatatatct

SEQ ID NO: 5466 - DNA, 13 bp, Artificial Sequence
  synthetic sequence
tgaccaatttatt

SEQ ID NO: 5467 - DNA, 13 bp, Artificial Sequence
  synthetic sequence
ggcttttgctgga

SEQ ID NO: 5468 - DNA, 13 bp, Artificial Sequence
  synthetic sequence
ctgaagtcattag

SEQ ID NO: 5469 - DNA, 13 bp, Artificial Sequence
  synthetic sequence
ctctccccatctt

SEQ ID NO: 5470 - DNA, 13 bp, Artificial Sequence
  synthetic sequence
tctttccctcaga

SEQ ID NO: 5471 - DNA, 13 bp, Artificial Sequence
  synthetic sequence
gcaaatcagttct

SEQ ID NO: 5472 - DNA, 13 bp, Artificial Sequence
  synthetic sequence
ctttatcacaaga

SEQ ID NO: 5473 - DNA, 13 bp, Artificial Sequence
  synthetic sequence
atgcattgttctt

SEQ ID NO: 5474 - DNA, 13 bp, Artificial Sequence
  synthetic sequence
cccatgtatgagg

SEQ ID NO: 5475 - DNA, 13 bp, Artificial Sequence
  synthetic sequence
ctgtctcctcata

SEQ ID NO: 5476 - DNA, 13 bp, Artificial Sequence
  synthetic sequence
ctctatggtatct

SEQ ID NO: 5477 - DNA, 13 bp, Artificial Sequence
  synthetic sequence
gggcatccaaatg

SEQ ID NO: 5478 - DNA, 13 bp, Artificial Sequence
  synthetic sequence
caactccataata

SEQ ID NO: 5479 - DNA, 13 bp, Artificial Sequence
  synthetic sequence
gaaagtgcttgag

SEQ ID NO: 5480 - DNA, 13 bp, Artificial Sequence
  synthetic sequence
tttcagctgacac

SEQ ID NO: 5481 - DNA, 13 bp, Artificial Sequence
  synthetic sequence
aaccccataatag

SEQ ID NO: 5482 - DNA, 13 bp, Artificial Sequence
  synthetic sequence
ccgccacatctgt

SEQ ID NO: 5483 - DNA, 13 bp, Artificial Sequence
  synthetic sequence
tgtcctttactcc

SEQ ID NO: 5484 - DNA, 13 bp, Artificial Sequence
  synthetic sequence
tcctgaatgaatg

SEQ ID NO: 5485 - DNA, 13 bp, Artificial Sequence
  synthetic sequence
gaccgcccaatat

SEQ ID NO: 5486 - DNA, 13 bp, Artificial Sequence
  synthetic sequence
ctctgggctgcca

SEQ ID NO: 5487 - DNA, 13 bp, Artificial Sequence
  synthetic sequence
cattgctgcagag

SEQ ID NO: 5488 - DNA, 13 bp, Artificial Sequence
  synthetic sequence
caaagaccggtgc

SEQ ID NO: 5489 - DNA, 13 bp, Artificial Sequence
  synthetic sequence
ttgtgcaaggctc

SEQ ID NO: 5490 - DNA, 13 bp, Artificial Sequence
  synthetic sequence
cagcctttgcaat

SEQ ID NO: 5491 - DNA, 13 bp, Artificial Sequence
  synthetic sequence
aaccagtcaaaga

SEQ ID NO: 5492 - DNA, 13 bp, Artificial Sequence
  synthetic sequence
ttcctgtggatgt

SEQ ID NO: 5493 - DNA, 13 bp, Artificial Sequence
  synthetic sequence
ccaacaaatgaaa

SEQ ID NO: 5494 - DNA, 13 bp, Artificial Sequence
  synthetic sequence
ccagtgagaggct

SEQ ID NO: 5495 - DNA, 13 bp, Artificial Sequence
  synthetic sequence
catcatcctcact

SEQ ID NO: 5496 - DNA, 13 bp, Artificial Sequence
  synthetic sequence
tgccaaagcaaaa

SEQ ID NO: 5497 - DNA, 13 bp, Artificial Sequence
  synthetic sequence
atgctgtgccaga

SEQ ID NO: 5498 - DNA, 13 bp, Artificial Sequence
  synthetic sequence
tgagctccctctt

SEQ ID NO: 5499 - DNA, 13 bp, Artificial Sequence
  synthetic sequence
gcaaccatcttct

SEQ ID NO: 5500 - DNA, 13 bp, Artificial Sequence
  synthetic sequence
actattttggagc

SEQ ID NO: 5501 - DNA, 13 bp, Artificial Sequence
  synthetic sequence
tcaatcagatttg

SEQ ID NO: 5502 - DNA, 13 bp, Artificial Sequence
  synthetic sequence
cctatctgtacaa

SEQ ID NO: 5503 - DNA, 13 bp, Artificial Sequence
  synthetic sequence
acaatatttacat

SEQ ID NO: 5504 - DNA, 13 bp, Artificial Sequence
  synthetic sequence
ccctctcaaagac

SEQ ID NO: 5505 - DNA, 13 bp, Artificial Sequence
  synthetic sequence
tgctgcctcaccc

SEQ ID NO: 5506 - DNA, 13 bp, Artificial Sequence
  synthetic sequence
ctgccactctggc

SEQ ID NO: 5507 - DNA, 13 bp, Artificial Sequence
  synthetic sequence
gcttatctgtaca

SEQ ID NO: 5508 - DNA, 13 bp, Artificial Sequence
  synthetic sequence
gggcagtgagcta

SEQ ID NO: 5509 - DNA, 13 bp, Artificial Sequence
  synthetic sequence
tatcaaagctttt

SEQ ID NO: 5510 - DNA, 13 bp, Artificial Sequence
  synthetic sequence
gccacattttaga

SEQ ID NO: 5511 - DNA, 13 bp, Artificial Sequence
  synthetic sequence
cacaaagctccct

SEQ ID NO: 5512 - DNA, 13 bp, Artificial Sequence
  synthetic sequence
ggatgatgatgaa

SEQ ID NO: 5513 - DNA, 13 bp, Artificial Sequence
  synthetic sequence
tcattgctagagt

SEQ ID NO: 5514 - DNA, 13 bp, Artificial Sequence
  synthetic sequence
tctcctccataag

SEQ ID NO: 5515 - DNA, 13 bp, Artificial Sequence
  synthetic sequence
tttgctggcatgg

SEQ ID NO: 5516 - DNA, 13 bp, Artificial Sequence
  synthetic sequence
ctgtcatggcagc

SEQ ID NO: 5517 - DNA, 13 bp, Artificial Sequence
  synthetic sequence
tcagctgctgtca

SEQ ID NO: 5518 - DNA, 13 bp, Artificial Sequence
  synthetic sequence
cccttctctacca

SEQ ID NO: 5519 - DNA, 13 bp, Artificial Sequence
  synthetic sequence
gtccgagagtttg

SEQ ID NO: 5520 - DNA, 13 bp, Artificial Sequence
  synthetic sequence
tgtttgtgaggat

SEQ ID NO: 5521 - DNA, 13 bp, Artificial Sequence
  synthetic sequence
tgtttgagaatgg

SEQ ID NO: 5522 - DNA, 13 bp, Artificial Sequence
  synthetic sequence
tggatggaagaca

SEQ ID NO: 5523 - DNA, 13 bp, Artificial Sequence
  synthetic sequence
ccatcattgagct

SEQ ID NO: 5524 - DNA, 13 bp, Artificial Sequence
  synthetic sequence
aacagatcactgt

SEQ ID NO: 5525 - DNA, 13 bp, Artificial Sequence
  synthetic sequence
caaatgtgggaag

SEQ ID NO: 5526 - DNA, 13 bp, Artificial Sequence
  synthetic sequence
gaagaccactggc

SEQ ID NO: 5527 - DNA, 13 bp, Artificial Sequence
  synthetic sequence
cccgcgtgttgtc

SEQ ID NO: 5528 - DNA, 13 bp, Artificial Sequence
  synthetic sequence
accttggatgtgg

SEQ ID NO: 5529 - DNA, 13 bp, Artificial Sequence
  synthetic sequence
tggaggaacagag

SEQ ID NO: 5530 - DNA, 13 bp, Artificial Sequence
  synthetic sequence
tgggtgccatgtt

SEQ ID NO: 5531 - DNA, 13 bp, Artificial Sequence
  synthetic sequence
tggtgctgcagga

SEQ ID NO: 5532 - DNA, 13 bp, Artificial Sequence
  synthetic sequence
acggtttggtttg

SEQ ID NO: 5533 - DNA, 13 bp, Artificial Sequence
  synthetic sequence
tgatgaccatggg

SEQ ID NO: 5534 - DNA, 13 bp, Artificial Sequence
  synthetic sequence
ttgggggcattac

SEQ ID NO: 5535 - DNA, 13 bp, Artificial Sequence
  synthetic sequence
ctgaggttgaaga

SEQ ID NO: 5536 - DNA, 13 bp, Artificial Sequence
  synthetic sequence
tcaacaggacttt

SEQ ID NO: 5537 - DNA, 13 bp, Artificial Sequence
  synthetic sequence
gccagggtgtact

SEQ ID NO: 5538 - DNA, 13 bp, Artificial Sequence
  synthetic sequence
tacaggatcatga

SEQ ID NO: 5539 - DNA, 13 bp, Artificial Sequence
  synthetic sequence
ctctcacgtttct

SEQ ID NO: 5540 - DNA, 13 bp, Artificial Sequence
  synthetic sequence
acagaaggagaag

SEQ ID NO: 5541 - DNA, 13 bp, Artificial Sequence
  synthetic sequence
actgtggagtcgc

SEQ ID NO: 5542 - DNA, 13 bp, Artificial Sequence
  synthetic sequence
ccaccaaagctgc

SEQ ID NO: 5543 - DNA, 13 bp, Artificial Sequence
  synthetic sequence
agtctggaagcag

SEQ ID NO: 5544 - DNA, 13 bp, Artificial Sequence
  synthetic sequence
gactgttggtgca

SEQ ID NO: 5545 - DNA, 13 bp, Artificial Sequence
  synthetic sequence
tggcagccaacga

SEQ ID NO: 5546 - DNA, 13 bp, Artificial Sequence
  synthetic sequence
tcaatggagtggt

SEQ ID NO: 5547 - DNA, 13 bp, Artificial Sequence
  synthetic sequence
ccatggatgggga

SEQ ID NO: 5548 - DNA, 13 bp, Artificial Sequence
  synthetic sequence
aggctgatgtctc

SEQ ID NO: 5549 - DNA, 13 bp, Artificial Sequence
  synthetic sequence
tgggaaagtgatg

SEQ ID NO: 5550 - DNA, 13 bp, Artificial Sequence
  synthetic sequence
gaggattttggat

SEQ ID NO: 5551 - DNA, 13 bp, Artificial Sequence
  synthetic sequence
tgtggggcgatgg

SEQ ID NO: 5552 - DNA, 13 bp, Artificial Sequence
  synthetic sequence
gtgttggaattgc

SEQ ID NO: 5553 - DNA, 13 bp, Artificial Sequence
  synthetic sequence
ctgatgtgttgaa

SEQ ID NO: 5554 - DNA, 13 bp, Artificial Sequence
  synthetic sequence
gcaacaccatgca

SEQ ID NO: 5555 - DNA, 13 bp, Artificial Sequence
  synthetic sequence
taaagaacatgga

SEQ ID NO: 5556 - DNA, 13 bp, Artificial Sequence
  synthetic sequence
cgcgaggcttccc

SEQ ID NO: 5557 - DNA, 13 bp, Artificial Sequence
  synthetic sequence
gagcgcaccacac

SEQ ID NO: 5558 - DNA, 13 bp, Artificial Sequence
  synthetic sequence
aaaggacctggaa

SEQ ID NO: 5559 - DNA, 13 bp, Artificial Sequence
  synthetic sequence
gtggtggaacctg

SEQ ID NO: 5560 - DNA, 13 bp, Artificial Sequence
  synthetic sequence
atgattggcctga

SEQ ID NO: 5561 - DNA, 13 bp, Artificial Sequence
  synthetic sequence
aggtgcttctggg

SEQ ID NO: 5562 - DNA, 13 bp, Artificial Sequence
  synthetic sequence
tcacagggtgccg

SEQ ID NO: 5563 - DNA, 13 bp, Artificial Sequence
  synthetic sequence
gactgctggtgca

SEQ ID NO: 5564 - DNA, 13 bp, Artificial Sequence
  synthetic sequence
ccatggacgggga

SEQ ID NO: 5565 - DNA, 13 bp, Artificial Sequence
  synthetic sequence
gtgtactcagacc

SEQ ID NO: 5566 - DNA, 13 bp, Artificial Sequence
  synthetic sequence
gtggggtgatgga

SEQ ID NO: 5567 - DNA, 13 bp, Artificial Sequence
  synthetic sequence
gtgttggaactgc

SEQ ID NO: 5568 - DNA, 13 bp, Artificial Sequence
  synthetic sequence
ttgggggtattac

SEQ ID NO: 5569 - DNA, 13 bp, Artificial Sequence
  synthetic sequence
aaaacgtccagac

SEQ ID NO: 5570 - DNA, 13 bp, Artificial Sequence
  synthetic sequence
gctatgctgagtc

SEQ ID NO: 5571 - DNA, 13 bp, Artificial Sequence
  synthetic sequence
gccaatgaaatgg

SEQ ID NO: 5572 - DNA, 13 bp, Artificial Sequence
  synthetic sequence
ggaagcaacacaa

SEQ ID NO: 5573 - DNA, 13 bp, Artificial Sequence
  synthetic sequence
gaagaacaccgca

SEQ ID NO: 5574 - DNA, 13 bp, Artificial Sequence
  synthetic sequence
gtcatgcagaaaa

SEQ ID NO: 5575 - DNA, 13 bp, Artificial Sequence
  synthetic sequence
ttgggctgatcgc

SEQ ID NO: 5576 - DNA, 13 bp, Artificial Sequence
  synthetic sequence
atggaagagtcat

SEQ ID NO: 5577 - DNA, 13 bp, Artificial Sequence
  synthetic sequence
tggagtttgaaga

SEQ ID NO: 5578 - DNA, 13 bp, Artificial Sequence
  synthetic sequence
acgtccaagccag

SEQ ID NO: 5579 - DNA, 13 bp, Artificial Sequence
  synthetic sequence
ggataactgagta

SEQ ID NO: 5580 - DNA, 13 bp, Artificial Sequence
  synthetic sequence
tgcaaaggaaagg

SEQ ID NO: 5581 - DNA, 13 bp, Artificial Sequence
  synthetic sequence
caggagtgttcaa

SEQ ID NO: 5582 - DNA, 13 bp, Artificial Sequence
  synthetic sequence
ggagcgatgtttg

SEQ ID NO: 5583 - DNA, 13 bp, Artificial Sequence
  synthetic sequence
atgggaagtgcct

SEQ ID NO: 5584 - DNA, 13 bp, Artificial Sequence
  synthetic sequence
gcacaaatctggg

SEQ ID NO: 5585 - DNA, 13 bp, Artificial Sequence
  synthetic sequence
ttgtggatctcgg

SEQ ID NO: 5586 - DNA, 13 bp, Artificial Sequence
  synthetic sequence
tgcaccctccctc

SEQ ID NO: 5587 - DNA, 13 bp, Artificial Sequence
  synthetic sequence
cttgtgaatgggg

SEQ ID NO: 5588 - DNA, 13 bp, Artificial Sequence
  synthetic sequence
cggttggaggagt

SEQ ID NO: 5589 - DNA, 13 bp, Artificial Sequence
  synthetic sequence
ggaacagtatgga

SEQ ID NO: 5590 - DNA, 13 bp, Artificial Sequence
  synthetic sequence
caggcctcaagag

SEQ ID NO: 5591 - DNA, 13 bp, Artificial Sequence
  synthetic sequence
gttgaatctcatg

SEQ ID NO: 5592 - DNA, 13 bp, Artificial Sequence
  synthetic sequence
tagcttcggtcag

SEQ ID NO: 5593 - DNA, 13 bp, Artificial Sequence
  synthetic sequence
tctccaggggctg

SEQ ID NO: 5594 - DNA, 13 bp, Artificial Sequence
  synthetic sequence
gcgtttacagaat

SEQ ID NO: 5595 - DNA, 13 bp, Artificial Sequence
  synthetic sequence
tcacaggctctag

SEQ ID NO: 5596 - DNA, 13 bp, Artificial Sequence
  synthetic sequence
gctttctggagtt

SEQ ID NO: 5597 - DNA, 13 bp, Artificial Sequence
  synthetic sequence
cacagcaattgct

SEQ ID NO: 5598 - DNA, 13 bp, Artificial Sequence
  synthetic sequence
gtttcttagcacg

SEQ ID NO: 5599 - DNA, 13 bp, Artificial Sequence
  synthetic sequence
gtgaaggacgagc

SEQ ID NO: 5600 - DNA, 13 bp, Artificial Sequence
  synthetic sequence
gaggaggaaagac

SEQ ID NO: 5601 - DNA, 13 bp, Artificial Sequence
  synthetic sequence
cctgtgtgagctg

SEQ ID NO: 5602 - DNA, 13 bp, Artificial Sequence
  synthetic sequence
acacccatcatgc

SEQ ID NO: 5603 - DNA, 13 bp, Artificial Sequence
  synthetic sequence
ctgagatgctgag

SEQ ID NO: 5604 - DNA, 13 bp, Artificial Sequence
  synthetic sequence
cactattcacact

SEQ ID NO: 5605 - DNA, 13 bp, Artificial Sequence
  synthetic sequence
tccataacatgga

SEQ ID NO: 5606 - DNA, 13 bp, Artificial Sequence
  synthetic sequence
ttgtgtttgtcgt

SEQ ID NO: 5607 - DNA, 13 bp, Artificial Sequence
  synthetic sequence
gggagatccctga

SEQ ID NO: 5608 - DNA, 13 bp, Artificial Sequence
  synthetic sequence
accattggcacaa

SEQ ID NO: 5609 - DNA, 13 bp, Artificial Sequence
  synthetic sequence
atagaggagaatg

SEQ ID NO: 5610 - DNA, 13 bp, Artificial Sequence
  synthetic sequence
agaatcgcgcttg

SEQ ID NO: 5611 - DNA, 13 bp, Artificial Sequence
  synthetic sequence
gaaagagttgatg

SEQ ID NO: 5612 - DNA, 13 bp, Artificial Sequence
  synthetic sequence
tgtgaacaaacaa

SEQ ID NO: 5613 - DNA, 13 bp, Artificial Sequence
  synthetic sequence
gagctcacatacc

SEQ ID NO: 5614 - DNA, 13 bp, Artificial Sequence
  synthetic sequence
gtgacttgataat

SEQ ID NO: 5615 - DNA, 13 bp, Artificial Sequence
  synthetic sequence
tcctctcaaaacc

SEQ ID NO: 5616 - DNA, 13 bp, Artificial Sequence
  synthetic sequence
ccatggatggaga

SEQ ID NO: 5617 - DNA, 13 bp, Artificial Sequence
  synthetic sequence
agggggacacgac

SEQ ID NO: 5618 - DNA, 13 bp, Artificial Sequence
  synthetic sequence
agatgggttggct

SEQ ID NO: 5619 - DNA, 13 bp, Artificial Sequence
  synthetic sequence
gtcagcgatctct

SEQ ID NO: 5620 - DNA, 13 bp, Artificial Sequence
  synthetic sequence
taggcagagctcg

SEQ ID NO: 5621 - DNA, 13 bp, Artificial Sequence
  synthetic sequence
gacacaggtcacg

SEQ ID NO: 5622 - DNA, 13 bp, Artificial Sequence
  synthetic sequence
tacgaatggatca

SEQ ID NO: 5623 - DNA, 13 bp, Artificial Sequence
  synthetic sequence
ctactccacacag

SEQ ID NO: 5624 - DNA, 13 bp, Artificial Sequence
  synthetic sequence
agcggaagggcat

SEQ ID NO: 5625 - DNA, 13 bp, Artificial Sequence
  synthetic sequence
accaggagggccc

SEQ ID NO: 5626 - DNA, 13 bp, Artificial Sequence
  synthetic sequence
atttgtgttggct

SEQ ID NO: 5627 - DNA, 13 bp, Artificial Sequence
  synthetic sequence
atcgtcacaaagt

SEQ ID NO: 5628 - DNA, 13 bp, Artificial Sequence
  synthetic sequence
tgatcctgggaga

SEQ ID NO: 5629 - DNA, 13 bp, Artificial Sequence
  synthetic sequence
gcatggctgtcag

SEQ ID NO: 5630 - DNA, 13 bp, Artificial Sequence
  synthetic sequence
cttgctgctggac

SEQ ID NO: 5631 - DNA, 13 bp, Artificial Sequence
  synthetic sequence
gcaccaaatgtgg

SEQ ID NO: 5632 - DNA, 13 bp, Artificial Sequence
  synthetic sequence
caccttaccacca

SEQ ID NO: 5633 - DNA, 13 bp, Artificial Sequence
  synthetic sequence
ctagtcctggtgt

SEQ ID NO: 5634 - DNA, 13 bp, Artificial Sequence
  synthetic sequence
tgaccagccaggt

SEQ ID NO: 5635 - DNA, 13 bp, Artificial Sequence
  synthetic sequence
tacgtcaggtatg

SEQ ID NO: 5636 - DNA, 13 bp, Artificial Sequence
  synthetic sequence
tggaacggtggtg

SEQ ID NO: 5637 - DNA, 13 bp, Artificial Sequence
  synthetic sequence
agaacgttaagaa

SEQ ID NO: 5638 - DNA, 13 bp, Artificial Sequence
  synthetic sequence
caggcagcaccgt

SEQ ID NO: 5639 - DNA, 13 bp, Artificial Sequence
  synthetic sequence
gtccacctcttgc

SEQ ID NO: 5640 - DNA, 13 bp, Artificial Sequence
  synthetic sequence
gccacatgaacca

SEQ ID NO: 5641 - DNA, 13 bp, Artificial Sequence
  synthetic sequence
cccatccacaaca

SEQ ID NO: 5642 - DNA, 13 bp, Artificial Sequence
  synthetic sequence
acatgacatcaac

SEQ ID NO: 5643 - DNA, 13 bp, Artificial Sequence
  synthetic sequence
tccacatacttct

SEQ ID NO: 5644 - DNA, 13 bp, Artificial Sequence
  synthetic sequence
cattcataagtga

SEQ ID NO: 5645 - DNA, 13 bp, Artificial Sequence
  synthetic sequence
gcatgttgatgtt

SEQ ID NO: 5646 - DNA, 13 bp, Artificial Sequence
  synthetic sequence
ctcctctctttgt

SEQ ID NO: 5647 - DNA, 13 bp, Artificial Sequence
  synthetic sequence
caaaggtgttgtt

SEQ ID NO: 5648 - DNA, 13 bp, Artificial Sequence
  synthetic sequence
gttgttcccttca

SEQ ID NO: 5649 - DNA, 13 bp, Artificial Sequence
  synthetic sequence
aagccatttgaaa

SEQ ID NO: 5650 - DNA, 13 bp, Artificial Sequence
  synthetic sequence
catgatttgactt

SEQ ID NO: 5651 - DNA, 13 bp, Artificial Sequence
  synthetic sequence
gctcctttctttt

SEQ ID NO: 5652 - DNA, 13 bp, Artificial Sequence
  synthetic sequence
ttcgtgatgactt

SEQ ID NO: 5653 - DNA, 13 bp, Artificial Sequence
  synthetic sequence
ttgtcatccactc

SEQ ID NO: 5654 - DNA, 13 bp, Artificial Sequence
  synthetic sequence
gttgttctcctct

SEQ ID NO: 5655 - DNA, 13 bp, Artificial Sequence
  synthetic sequence
aaccactcacgat

SEQ ID NO: 5656 - DNA, 13 bp, Artificial Sequence
  synthetic sequence
tctcaatccacat

SEQ ID NO: 5657 - DNA, 13 bp, Artificial Sequence
  synthetic sequence
tccatcctttcac

SEQ ID NO: 5658 - DNA, 13 bp, Artificial Sequence
  synthetic sequence
ctccgatgtcaca

SEQ ID NO: 5659 - DNA, 13 bp, Artificial Sequence
  synthetic sequence
ccaacccccacgc

SEQ ID NO: 5660 - DNA, 13 bp, Artificial Sequence
  synthetic sequence
cttccatctttca

SEQ ID NO: 5661 - DNA, 13 bp, Artificial Sequence
  synthetic sequence
atcaccctgctcg

SEQ ID NO: 5662 - DNA, 13 bp, Artificial Sequence
  synthetic sequence
ggcagttcctcca

SEQ ID NO: 5663 - DNA, 13 bp, Artificial Sequence
  synthetic sequence
ccgcacactcctt

SEQ ID NO: 5664 - DNA, 13 bp, Artificial Sequence
  synthetic sequence
ccatccactacag

SEQ ID NO: 5665 - DNA, 13 bp, Artificial Sequence
  synthetic sequence
caaatcaggaaca

SEQ ID NO: 5666 - DNA, 13 bp, Artificial Sequence
  synthetic sequence
tagttccaggttc

SEQ ID NO: 5667 - DNA, 13 bp, Artificial Sequence
  synthetic sequence
ctagagactggat

SEQ ID NO: 5668 - DNA, 13 bp, Artificial Sequence
  synthetic sequence
gtttctccacatc

SEQ ID NO: 5669 - DNA, 13 bp, Artificial Sequence
  synthetic sequence
atgtaatctgacg

SEQ ID NO: 5670 - DNA, 13 bp, Artificial Sequence
  synthetic sequence
cctctgccaggtt

SEQ ID NO: 5671 - DNA, 13 bp, Artificial Sequence
  synthetic sequence
agacgccgatgtt

SEQ ID NO: 5672 - DNA, 13 bp, Artificial Sequence
  synthetic sequence
tccgggatctcag

SEQ ID NO: 5673 - DNA, 13 bp, Artificial Sequence
  synthetic sequence
ctttccgctctct

SEQ ID NO: 5674 - DNA, 13 bp, Artificial Sequence
  synthetic sequence
cctctcgagagca

SEQ ID NO: 5675 - DNA, 13 bp, Artificial Sequence
  synthetic sequence
accagggcatatc

SEQ ID NO: 5676 - DNA, 13 bp, Artificial Sequence
  synthetic sequence
acctcatcctgcc

SEQ ID NO: 5677 - DNA, 13 bp, Artificial Sequence
  synthetic sequence
cccaatacatctc

SEQ ID NO: 5678 - DNA, 13 bp, Artificial Sequence
  synthetic sequence
ccacttcgtactt

SEQ ID NO: 5679 - DNA, 13 bp, Artificial Sequence
  synthetic sequence
ttgagctccgccg

SEQ ID NO: 5680 - DNA, 13 bp, Artificial Sequence
  synthetic sequence
cccagtacatctc

SEQ ID NO: 5681 - DNA, 13 bp, Artificial Sequence
  synthetic sequence
tcatacttgatgt

SEQ ID NO: 5682 - DNA, 13 bp, Artificial Sequence
  synthetic sequence
ctctcgatccaca

SEQ ID NO: 5683 - DNA, 13 bp, Artificial Sequence
  synthetic sequence
catttttcatgat

SEQ ID NO: 5684 - DNA, 13 bp, Artificial Sequence
  synthetic sequence
tctccaatgtcac

SEQ ID NO: 5685 - DNA, 13 bp, Artificial Sequence
  synthetic sequence
tcatccattctcc

SEQ ID NO: 5686 - DNA, 13 bp, Artificial Sequence
  synthetic sequence
tgttgatgtagtc

SEQ ID NO: 5687 - DNA, 13 bp, Artificial Sequence
  synthetic sequence
ttcatgatcagtt

SEQ ID NO: 5688 - DNA, 13 bp, Artificial Sequence
  synthetic sequence
ctgctccatggca

SEQ ID NO: 5689 - DNA, 13 bp, Artificial Sequence
  synthetic sequence
tccaggctctgtc

SEQ ID NO: 5690 - DNA, 13 bp, Artificial Sequence
  synthetic sequence
cttccattctctc

SEQ ID NO: 5691 - DNA, 13 bp, Artificial Sequence
  synthetic sequence
cactctcagtggt

SEQ ID NO: 5692 - DNA, 13 bp, Artificial Sequence
  synthetic sequence
gcatccatccaat

SEQ ID NO: 5693 - DNA, 13 bp, Artificial Sequence
  synthetic sequence
cctcttcccacca

SEQ ID NO: 5694 - DNA, 13 bp, Artificial Sequence
  synthetic sequence
cttccatgttcat

SEQ ID NO: 5695 - DNA, 13 bp, Artificial Sequence
  synthetic sequence
tcttttgttttgt

SEQ ID NO: 5696 - DNA, 13 bp, Artificial Sequence
  synthetic sequence
ccatcctcctcgc

SEQ ID NO: 5697 - DNA, 13 bp, Artificial Sequence
  synthetic sequence
tcacttcatagct

SEQ ID NO: 5698 - DNA, 13 bp, Artificial Sequence
  synthetic sequence
agttcaagaacct

SEQ ID NO: 5699 - DNA, 13 bp, Artificial Sequence
  synthetic sequence
ggacctcatcatg

SEQ ID NO: 5700 - DNA, 13 bp, Artificial Sequence
  synthetic sequence
ccactaaccaccg

SEQ ID NO: 5701 - DNA, 13 bp, Artificial Sequence
  synthetic sequence
ggccttttccttt

SEQ ID NO: 5702 - DNA, 13 bp, Artificial Sequence
  synthetic sequence
ctgcatgtgcttt

SEQ ID NO: 5703 - DNA, 13 bp, Artificial Sequence
  synthetic sequence
attgtctgaaggg

SEQ ID NO: 5704 - DNA, 13 bp, Artificial Sequence
  synthetic sequence
cacatcctgggtt

SEQ ID NO: 5705 - DNA, 13 bp, Artificial Sequence
  synthetic sequence
ctgtcgatcactc

SEQ ID NO: 5706 - DNA, 13 bp, Artificial Sequence
  synthetic sequence
gtgtgagcacaca

SEQ ID NO: 5707 - DNA, 13 bp, Artificial Sequence
  synthetic sequence
ctttcaccaagct

SEQ ID NO: 5708 - DNA, 13 bp, Artificial Sequence
  synthetic sequence
gcccctttctttt

SEQ ID NO: 5709 - DNA, 13 bp, Artificial Sequence
  synthetic sequence
tttctcctcaaaa

SEQ ID NO: 5710 - DNA, 13 bp, Artificial Sequence
  synthetic sequence
taagccatttgga

SEQ ID NO: 5711 - DNA, 13 bp, Artificial Sequence
  synthetic sequence
tgtcttcatatct

SEQ ID NO: 5712 - DNA, 13 bp, Artificial Sequence
  synthetic sequence
atgatttaacttc

SEQ ID NO: 5713 - DNA, 13 bp, Artificial Sequence
  synthetic sequence
catatgttgttcc

SEQ ID NO: 5714 - DNA, 13 bp, Artificial Sequence
  synthetic sequence
ccttggtctccgg

SEQ ID NO: 5715 - DNA, 13 bp, Artificial Sequence
  synthetic sequence
cctttggtgaggg

SEQ ID NO: 5716 - DNA, 13 bp, Artificial Sequence
  synthetic sequence
tccagggtcctcc

SEQ ID NO: 5717 - DNA, 13 bp, Artificial Sequence
  synthetic sequence
actcaacttccgg

SEQ ID NO: 5718 - DNA, 13 bp, Artificial Sequence
  synthetic sequence
atcagtccgtttg

SEQ ID NO: 5719 - DNA, 13 bp, Artificial Sequence
  synthetic sequence
cacattctgggac

SEQ ID NO: 5720 - DNA, 13 bp, Artificial Sequence
  synthetic sequence
gccgacagcactg

SEQ ID NO: 5721 - DNA, 13 bp, Artificial Sequence
  synthetic sequence
tggcaggtccacg

SEQ ID NO: 5722 - DNA, 13 bp, Artificial Sequence
  synthetic sequence
agcatccaaccaa

SEQ ID NO: 5723 - DNA, 13 bp, Artificial Sequence
  synthetic sequence
ccacttcatactt

SEQ ID NO: 5724 - DNA, 13 bp, Artificial Sequence
  synthetic sequence
aatctcatttcca

SEQ ID NO: 5725 - DNA, 13 bp, Artificial Sequence
  synthetic sequence
agccacataaacc

SEQ ID NO: 5726 - DNA, 13 bp, Artificial Sequence
  synthetic sequence
tcacatcataact

SEQ ID NO: 5727 - DNA, 13 bp, Artificial Sequence
  synthetic sequence
gctggttgtctgt

SEQ ID NO: 5728 - DNA, 13 bp, Artificial Sequence
  synthetic sequence
gttttgctgtgcc

SEQ ID NO: 5729 - DNA, 13 bp, Artificial Sequence
  synthetic sequence
agagccaagcata

SEQ ID NO: 5730 - DNA, 13 bp, Artificial Sequence
  synthetic sequence
ccccatcaagcaa

SEQ ID NO: 5731 - DNA, 13 bp, Artificial Sequence
  synthetic sequence
gcatgttaatgtt

SEQ ID NO: 5732 - DNA, 13 bp, Artificial Sequence
  synthetic sequence
gaactgccctttc

SEQ ID NO: 5733 - DNA, 13 bp, Artificial Sequence
  synthetic sequence
gcctccatattca

SEQ ID NO: 5734 - DNA, 13 bp, Artificial Sequence
  synthetic sequence
ttattgaggtcaa

SEQ ID NO: 5735 - DNA, 13 bp, Artificial Sequence
  synthetic sequence
tcttccggctgtc

SEQ ID NO: 5736 - DNA, 13 bp, Artificial Sequence
  synthetic sequence
accaccagtgttc

SEQ ID NO: 5737 - DNA, 13 bp, Artificial Sequence
  synthetic sequence
ctgactttgggtc

SEQ ID NO: 5738 - DNA, 13 bp, Artificial Sequence
  synthetic sequence
tgatgcccatcca

SEQ ID NO: 5739 - DNA, 13 bp, Artificial Sequence
  synthetic sequence
ctgggatctcagt

SEQ ID NO: 5740 - DNA, 13 bp, Artificial Sequence
  synthetic sequence
ttcatacctcctc

SEQ ID NO: 5741 - DNA, 13 bp, Artificial Sequence
  synthetic sequence
agagcatctggca

SEQ ID NO: 5742 - DNA, 13 bp, Artificial Sequence
  synthetic sequence
tttatgcatactt

SEQ ID NO: 5743 - DNA, 13 bp, Artificial Sequence
  synthetic sequence
tggttgatagcca

SEQ ID NO: 5744 - DNA, 13 bp, Artificial Sequence
  synthetic sequence
aggttgaggtcca

SEQ ID NO: 5745 - DNA, 13 bp, Artificial Sequence
  synthetic sequence
attcccatccaca

SEQ ID NO: 5746 - DNA, 13 bp, Artificial Sequence
  synthetic sequence
ccacattgcctga

SEQ ID NO: 5747 - DNA, 13 bp, Artificial Sequence
  synthetic sequence
gatgtggcagagt

SEQ ID NO: 5748 - DNA, 13 bp, Artificial Sequence
  synthetic sequence
actgatcgtagac

SEQ ID NO: 5749 - DNA, 13 bp, Artificial Sequence
  synthetic sequence
tctgcaaatcgag

SEQ ID NO: 5750 - DNA, 13 bp, Artificial Sequence
  synthetic sequence
agaaccggactcc

SEQ ID NO: 5751 - DNA, 13 bp, Artificial Sequence
  synthetic sequence
atgatgaacagga

SEQ ID NO: 5752 - DNA, 13 bp, Artificial Sequence
  synthetic sequence
ttggtgagcatga

SEQ ID NO: 5753 - DNA, 13 bp, Artificial Sequence
  synthetic sequence
ttcattgaggggg

SEQ ID NO: 5754 - DNA, 13 bp, Artificial Sequence
  synthetic sequence
acatctgaggacc

SEQ ID NO: 5755 - DNA, 13 bp, Artificial Sequence
  synthetic sequence
tgctcatcggctt

SEQ ID NO: 5756 - DNA, 13 bp, Artificial Sequence
  synthetic sequence
ggaatggacccat

SEQ ID NO: 5757 - DNA, 13 bp, Artificial Sequence
  synthetic sequence
atgacaatgacaa

SEQ ID NO: 5758 - DNA, 13 bp, Artificial Sequence
  synthetic sequence
gatggtggttgtg

SEQ ID NO: 5759 - DNA, 13 bp, Artificial Sequence
  synthetic sequence
cgcagcagtcaaa

SEQ ID NO: 5760 - DNA, 13 bp, Artificial Sequence
  synthetic sequence
aggaagatcatga

SEQ ID NO: 5761 - DNA, 13 bp, Artificial Sequence
  synthetic sequence
aagacccggcaag

SEQ ID NO: 5762 - DNA, 13 bp, Artificial Sequence
  synthetic sequence
aacatgatgggga

SEQ ID NO: 5763 - DNA, 13 bp, Artificial Sequence
  synthetic sequence
tctgaaatgaagg

SEQ ID NO: 5764 - DNA, 13 bp, Artificial Sequence
  synthetic sequence
gggaaggtggaca

SEQ ID NO: 5765 - DNA, 13 bp, Artificial Sequence
  synthetic sequence
gatagaggctggg

SEQ ID NO: 5766 - DNA, 13 bp, Artificial Sequence
  synthetic sequence
actctgaggaagg

SEQ ID NO: 5767 - DNA, 13 bp, Artificial Sequence
  synthetic sequence
aagcttgcccagg

SEQ ID NO: 5768 - DNA, 13 bp, Artificial Sequence
  synthetic sequence
gggagaatgtgcc

SEQ ID NO: 5769 - DNA, 13 bp, Artificial Sequence
  synthetic sequence
ttggctctgcctt

SEQ ID NO: 5770 - DNA, 13 bp, Artificial Sequence
  synthetic sequence
acaatcttgatga

SEQ ID NO: 5771 - DNA, 13 bp, Artificial Sequence
  synthetic sequence
aagagtgcccatg

SEQ ID NO: 5772 - DNA, 13 bp, Artificial Sequence
  synthetic sequence
gcagagatggtga

SEQ ID NO: 5773 - DNA, 13 bp, Artificial Sequence
  synthetic sequence
gagactctgatga

SEQ ID NO: 5774 - DNA, 13 bp, Artificial Sequence
  synthetic sequence
aagcagaagaaac

SEQ ID NO: 5775 - DNA, 13 bp, Artificial Sequence
  synthetic sequence
cattttccagaat

SEQ ID NO: 5776 - DNA, 13 bp, Artificial Sequence
  synthetic sequence
atcaggaaccctc

SEQ ID NO: 5777 - DNA, 13 bp, Artificial Sequence
  synthetic sequence
tgcagttggagga

SEQ ID NO: 5778 - DNA, 13 bp, Artificial Sequence
  synthetic sequence
gagaggtgattgg

SEQ ID NO: 5779 - DNA, 13 bp, Artificial Sequence
  synthetic sequence
atggtcgattcat

SEQ ID NO: 5780 - DNA, 13 bp, Artificial Sequence
  synthetic sequence
gctctctccaatg

SEQ ID NO: 5781 - DNA, 13 bp, Artificial Sequence
  synthetic sequence
tggtgttttgaag

SEQ ID NO: 5782 - DNA, 13 bp, Artificial Sequence
  synthetic sequence
aatgccaggtgca

SEQ ID NO: 5783 - DNA, 13 bp, Artificial Sequence
  synthetic sequence
tggacaggagaaa

SEQ ID NO: 5784 - DNA, 13 bp, Artificial Sequence
  synthetic sequence
atccatttgctct

SEQ ID NO: 5785 - DNA, 13 bp, Artificial Sequence
  synthetic sequence
ataatgcccacca

SEQ ID NO: 5786 - DNA, 13 bp, Artificial Sequence
  synthetic sequence
tgattccatcttg

SEQ ID NO: 5787 - DNA, 13 bp, Artificial Sequence
  synthetic sequence
gcaatcaataaag

SEQ ID NO: 5788 - DNA, 13 bp, Artificial Sequence
  synthetic sequence
taggggtccttca

SEQ ID NO: 5789 - DNA, 13 bp, Artificial Sequence
  synthetic sequence
accttcaaggaca

SEQ ID NO: 5790 - DNA, 13 bp, Artificial Sequence
  synthetic sequence
atgacaacaacct

SEQ ID NO: 5791 - DNA, 13 bp, Artificial Sequence
  synthetic sequence
ggcaatggaattc

SEQ ID NO: 5792 - DNA, 13 bp, Artificial Sequence
  synthetic sequence
agtggtgctttga

SEQ ID NO: 5793 - DNA, 13 bp, Artificial Sequence
  synthetic sequence
ggtctgttcatgg

SEQ ID NO: 5794 - DNA, 13 bp, Artificial Sequence
  synthetic sequence
ggactgtctatgt

SEQ ID NO: 5795 - DNA, 13 bp, Artificial Sequence
  synthetic sequence
acaagtgaagaca

SEQ ID NO: 5796 - DNA, 13 bp, Artificial Sequence
  synthetic sequence
cagtgaatggaaa

SEQ ID NO: 5797 - DNA, 13 bp, Artificial Sequence
  synthetic sequence
aacatgatgggaa

SEQ ID NO: 5798 - DNA, 13 bp, Artificial Sequence
  synthetic sequence
catcctgggcctc

SEQ ID NO: 5799 - DNA, 13 bp, Artificial Sequence
  synthetic sequence
gatgactggctga

SEQ ID NO: 5800 - DNA, 13 bp, Artificial Sequence
  synthetic sequence
caccgcatccgga

SEQ ID NO: 5801 - DNA, 13 bp, Artificial Sequence
  synthetic sequence
gaacatcatcact

SEQ ID NO: 5802 - DNA, 13 bp, Artificial Sequence
  synthetic sequence
actgtggttatca

SEQ ID NO: 5803 - DNA, 13 bp, Artificial Sequence
  synthetic sequence
accgcagtggact

SEQ ID NO: 5804 - DNA, 13 bp, Artificial Sequence
  synthetic sequence
tcaatccaatagc

SEQ ID NO: 5805 - DNA, 13 bp, Artificial Sequence
  synthetic sequence
tcttgctggctgg

SEQ ID NO: 5806 - DNA, 13 bp, Artificial Sequence
  synthetic sequence
ggaatcctgatga

SEQ ID NO: 5807 - DNA, 13 bp, Artificial Sequence
  synthetic sequence
ctggtgcaatgcg

SEQ ID NO: 5808 - DNA, 13 bp, Artificial Sequence
  synthetic sequence
cctttctgctctc

SEQ ID NO: 5809 - DNA, 13 bp, Artificial Sequence
  synthetic sequence
acccttacaggac

SEQ ID NO: 5810 - DNA, 13 bp, Artificial Sequence
  synthetic sequence
aggaaaatcatga

SEQ ID NO: 5811 - DNA, 13 bp, Artificial Sequence
  synthetic sequence
tacccacacatga

SEQ ID NO: 5812 - DNA, 13 bp, Artificial Sequence
  synthetic sequence
atcaggaatcctc

SEQ ID NO: 5813 - DNA, 13 bp, Artificial Sequence
  synthetic sequence
tgtggcctgtttg

SEQ ID NO: 5814 - DNA, 13 bp, Artificial Sequence
  synthetic sequence
tgaaagtgcaaca

SEQ ID NO: 5815 - DNA, 13 bp, Artificial Sequence
  synthetic sequence
catggatgcaagt

SEQ ID NO: 5816 - DNA, 13 bp, Artificial Sequence
  synthetic sequence
gtcaggtccagac

SEQ ID NO: 5817 - DNA, 13 bp, Artificial Sequence
  synthetic sequence
atggctgaagctg

SEQ ID NO: 5818 - DNA, 13 bp, Artificial Sequence
  synthetic sequence
atggcagaagcag

SEQ ID NO: 5819 - DNA, 13 bp, Artificial Sequence
  synthetic sequence
tggtcactgtcaa

SEQ ID NO: 5820 - DNA, 13 bp, Artificial Sequence
  synthetic sequence
ccaccgcctggaa

SEQ ID NO: 5821 - DNA, 13 bp, Artificial Sequence
  synthetic sequence
tccatgggggcac

SEQ ID NO: 5822 - DNA, 13 bp, Artificial Sequence
  synthetic sequence
cagatggttgctc

SEQ ID NO: 5823 - DNA, 13 bp, Artificial Sequence
  synthetic sequence
aatgacaacaact

SEQ ID NO: 5824 - DNA, 13 bp, Artificial Sequence
  synthetic sequence
cagtatggatgga

SEQ ID NO: 5825 - DNA, 13 bp, Artificial Sequence
  synthetic sequence
tttgtcctcatgg

SEQ ID NO: 5826 - DNA, 13 bp, Artificial Sequence
  synthetic sequence
atacatccatttg

SEQ ID NO: 5827 - DNA, 13 bp, Artificial Sequence
  synthetic sequence
cttggatgcaggt

SEQ ID NO: 5828 - DNA, 13 bp, Artificial Sequence
  synthetic sequence
aagtggacaccgg

SEQ ID NO: 5829 - DNA, 13 bp, Artificial Sequence
  synthetic sequence
ctggtgagcatga

SEQ ID NO: 5830 - DNA, 13 bp, Artificial Sequence
  synthetic sequence
atcagtgtgttcc

SEQ ID NO: 5831 - DNA, 13 bp, Artificial Sequence
  synthetic sequence
cccagaaacccgc

SEQ ID NO: 5832 - DNA, 13 bp, Artificial Sequence
  synthetic sequence
tcaggaatcccct

SEQ ID NO: 5833 - DNA, 13 bp, Artificial Sequence
  synthetic sequence
cagcaatcaaagc

SEQ ID NO: 5834 - DNA, 13 bp, Artificial Sequence
  synthetic sequence
gtgggaaaaggaa

SEQ ID NO: 5835 - DNA, 13 bp, Artificial Sequence
  synthetic sequence
actactcagaacc

SEQ ID NO: 5836 - DNA, 13 bp, Artificial Sequence
  synthetic sequence
gaaaggtggacac

SEQ ID NO: 5837 - DNA, 13 bp, Artificial Sequence
  synthetic sequence
tgtcagagatgaa

SEQ ID NO: 5838 - DNA, 13 bp, Artificial Sequence
  synthetic sequence
tgctgttctgcac

SEQ ID NO: 5839 - DNA, 13 bp, Artificial Sequence
  synthetic sequence
gatgacgagcaag

SEQ ID NO: 5840 - DNA, 13 bp, Artificial Sequence
  synthetic sequence
gaggaatggaaag

SEQ ID NO: 5841 - DNA, 13 bp, Artificial Sequence
  synthetic sequence
tgttttgagggtc

SEQ ID NO: 5842 - DNA, 13 bp, Artificial Sequence
  synthetic sequence
caatggctgtggt

SEQ ID NO: 5843 - DNA, 13 bp, Artificial Sequence
  synthetic sequence
gacgatgttgtct

SEQ ID NO: 5844 - DNA, 13 bp, Artificial Sequence
  synthetic sequence
aagttcacagact

SEQ ID NO: 5845 - DNA, 13 bp, Artificial Sequence
  synthetic sequence
ggaatattgtgac

SEQ ID NO: 5846 - DNA, 13 bp, Artificial Sequence
  synthetic sequence
acactagtctgtt

SEQ ID NO: 5847 - DNA, 13 bp, Artificial Sequence
  synthetic sequence
gcctgctcatggg

SEQ ID NO: 5848 - DNA, 13 bp, Artificial Sequence
  synthetic sequence
gagcaaatgagag

SEQ ID NO: 5849 - DNA, 13 bp, Artificial Sequence
  synthetic sequence
actagggttgttc

SEQ ID NO: 5850 - DNA, 13 bp, Artificial Sequence
  synthetic sequence
ttcttgcactctg

SEQ ID NO: 5851 - DNA, 13 bp, Artificial Sequence
  synthetic sequence
gggggatcctcat

SEQ ID NO: 5852 - DNA, 13 bp, Artificial Sequence
  synthetic sequence
cgtggtctgtcca

SEQ ID NO: 5853 - DNA, 13 bp, Artificial Sequence
  synthetic sequence
tttggttctgcct

SEQ ID NO: 5854 - DNA, 13 bp, Artificial Sequence
  synthetic sequence
gggaaaggaattc

SEQ ID NO: 5855 - DNA, 13 bp, Artificial Sequence
  synthetic sequence
tagagggaaacac

SEQ ID NO: 5856 - DNA, 13 bp, Artificial Sequence
  synthetic sequence
ggtgcaatgaggg

SEQ ID NO: 5857 - DNA, 13 bp, Artificial Sequence
  synthetic sequence
atggtctgcagta

SEQ ID NO: 5858 - DNA, 13 bp, Artificial Sequence
  synthetic sequence
ggacacatccgtt

SEQ ID NO: 5859 - DNA, 13 bp, Artificial Sequence
  synthetic sequence
tgggaagaagagc

SEQ ID NO: 5860 - DNA, 13 bp, Artificial Sequence
  synthetic sequence
gtgaagtggtggg

SEQ ID NO: 5861 - DNA, 13 bp, Artificial Sequence
  synthetic sequence
cttcttgttcaac

SEQ ID NO: 5862 - DNA, 13 bp, Artificial Sequence
  synthetic sequence
aatggcaagaagc

SEQ ID NO: 5863 - DNA, 13 bp, Artificial Sequence
  synthetic sequence
gaaatgaaggaag

SEQ ID NO: 5864 - DNA, 13 bp, Artificial Sequence
  synthetic sequence
aatcggccaagaa

SEQ ID NO: 5865 - DNA, 13 bp, Artificial Sequence
  synthetic sequence
cagctgaggactt

SEQ ID NO: 5866 - DNA, 13 bp, Artificial Sequence
  synthetic sequence
atttccatgaact

SEQ ID NO: 5867 - DNA, 13 bp, Artificial Sequence
  synthetic sequence
ttggactgcgcac

SEQ ID NO: 5868 - DNA, 13 bp, Artificial Sequence
  synthetic sequence
cggactgaaaact

SEQ ID NO: 5869 - DNA, 13 bp, Artificial Sequence
  synthetic sequence
cattctgaggagg

SEQ ID NO: 5870 - DNA, 13 bp, Artificial Sequence
  synthetic sequence
tcttcctggaatc

SEQ ID NO: 5871 - DNA, 13 bp, Artificial Sequence
  synthetic sequence
gagactcagatga

SEQ ID NO: 5872 - DNA, 13 bp, Artificial Sequence
  synthetic sequence
ccctttccagaaa

SEQ ID NO: 5873 - DNA, 13 bp, Artificial Sequence
  synthetic sequence
gacatggaaaatt

SEQ ID NO: 5874 - DNA, 13 bp, Artificial Sequence
  synthetic sequence
tcctacatcatgc

SEQ ID NO: 5875 - DNA, 13 bp, Artificial Sequence
  synthetic sequence
ttgcaacgatgct

SEQ ID NO: 5876 - DNA, 13 bp, Artificial Sequence
  synthetic sequence
gagggtctcctct

SEQ ID NO: 5877 - DNA, 13 bp, Artificial Sequence
  synthetic sequence
caaaggtctgctt

SEQ ID NO: 5878 - DNA, 13 bp, Artificial Sequence
  synthetic sequence
ttttatcccggtt

SEQ ID NO: 5879 - DNA, 13 bp, Artificial Sequence
  synthetic sequence
gctgccattcaga

SEQ ID NO: 5880 - DNA, 13 bp, Artificial Sequence
  synthetic sequence
tgtattcaaagac

SEQ ID NO: 5881 - DNA, 13 bp, Artificial Sequence
  synthetic sequence
ctggtggatcctt

SEQ ID NO: 5882 - DNA, 13 bp, Artificial Sequence
  synthetic sequence
ccaccacactctt

SEQ ID NO: 5883 - DNA, 13 bp, Artificial Sequence
  synthetic sequence
acatctggcatgt

SEQ ID NO: 5884 - DNA, 13 bp, Artificial Sequence
  synthetic sequence
ctttgcacattca

SEQ ID NO: 5885 - DNA, 13 bp, Artificial Sequence
  synthetic sequence
caatgcgccccct

SEQ ID NO: 5886 - DNA, 13 bp, Artificial Sequence
  synthetic sequence
acaatgccttcag

SEQ ID NO: 5887 - DNA, 13 bp, Artificial Sequence
  synthetic sequence
gtgacatgccaca

SEQ ID NO: 5888 - DNA, 13 bp, Artificial Sequence
  synthetic sequence
ctcttgccaaagt

SEQ ID NO: 5889 - DNA, 13 bp, Artificial Sequence
  synthetic sequence
tcatcacaacctg

SEQ ID NO: 5890 - DNA, 13 bp, Artificial Sequence
  synthetic sequence
tacacacaagtcc

SEQ ID NO: 5891 - DNA, 13 bp, Artificial Sequence
  synthetic sequence
gcatcaaacttga

SEQ ID NO: 5892 - DNA, 13 bp, Artificial Sequence
  synthetic sequence
gtcaacagagcca

SEQ ID NO: 5893 - DNA, 13 bp, Artificial Sequence
  synthetic sequence
agaatccaccacc

SEQ ID NO: 5894 - DNA, 13 bp, Artificial Sequence
  synthetic sequence
gttcactcagcac

SEQ ID NO: 5895 - DNA, 13 bp, Artificial Sequence
  synthetic sequence
cagccttggccac

SEQ ID NO: 5896 - DNA, 13 bp, Artificial Sequence
  synthetic sequence
cccatgacggcca

SEQ ID NO: 5897 - DNA, 13 bp, Artificial Sequence
  synthetic sequence
ggcatcactgtta

SEQ ID NO: 5898 - DNA, 13 bp, Artificial Sequence
  synthetic sequence
ttcaaggagcctt

SEQ ID NO: 5899 - DNA, 13 bp, Artificial Sequence
  synthetic sequence
ggtcattccaatc

SEQ ID NO: 5900 - DNA, 13 bp, Artificial Sequence
  synthetic sequence
gtttgacgcctcc

SEQ ID NO: 5901 - DNA, 13 bp, Artificial Sequence
  synthetic sequence
aaggtcactccac

SEQ ID NO: 5902 - DNA, 13 bp, Artificial Sequence
  synthetic sequence
cctgccagcactc

SEQ ID NO: 5903 - DNA, 13 bp, Artificial Sequence
  synthetic sequence
gccatatacatgg

SEQ ID NO: 5904 - DNA, 13 bp, Artificial Sequence
  synthetic sequence
gcctgctgagtca

SEQ ID NO: 5905 - DNA, 13 bp, Artificial Sequence
  synthetic sequence
tccacctccacaa

SEQ ID NO: 5906 - DNA, 13 bp, Artificial Sequence
  synthetic sequence
atccggccaactc

SEQ ID NO: 5907 - DNA, 13 bp, Artificial Sequence
  synthetic sequence
agcctcatgtccc

SEQ ID NO: 5908 - DNA, 13 bp, Artificial Sequence
  synthetic sequence
gtgatggtgttca

SEQ ID NO: 5909 - DNA, 13 bp, Artificial Sequence
  synthetic sequence
agtgagctgagta

SEQ ID NO: 5910 - DNA, 13 bp, Artificial Sequence
  synthetic sequence
tcagctactatca

SEQ ID NO: 5911 - DNA, 13 bp, Artificial Sequence
  synthetic sequence
tctggtaaacatt

SEQ ID NO: 5912 - DNA, 13 bp, Artificial Sequence
  synthetic sequence
gccaagatctgtg

SEQ ID NO: 5913 - DNA, 13 bp, Artificial Sequence
  synthetic sequence
attttatcctctc

SEQ ID NO: 5914 - DNA, 13 bp, Artificial Sequence
  synthetic sequence
gttttccttggcc

SEQ ID NO: 5915 - DNA, 13 bp, Artificial Sequence
  synthetic sequence
tgcgctgcccaac

SEQ ID NO: 5916 - DNA, 13 bp, Artificial Sequence
  synthetic sequence
cacgcattgtccc

SEQ ID NO: 5917 - DNA, 13 bp, Artificial Sequence
  synthetic sequence
aagagcgacagcc

SEQ ID NO: 5918 - DNA, 13 bp, Artificial Sequence
  synthetic sequence
ggatatgattgtg

SEQ ID NO: 5919 - DNA, 13 bp, Artificial Sequence
  synthetic sequence
atgtgagatgccc

SEQ ID NO: 5920 - DNA, 13 bp, Artificial Sequence
  synthetic sequence
accctctcttcaa

SEQ ID NO: 5921 - DNA, 13 bp, Artificial Sequence
  synthetic sequence
ctgctatgctagc

SEQ ID NO: 5922 - DNA, 13 bp, Artificial Sequence
  synthetic sequence
gagatgtctacct

SEQ ID NO: 5923 - DNA, 13 bp, Artificial Sequence
  synthetic sequence
gccaatgacagca

SEQ ID NO: 5924 - DNA, 13 bp, Artificial Sequence
  synthetic sequence
aatcacacttgcc

SEQ ID NO: 5925 - DNA, 13 bp, Artificial Sequence
  synthetic sequence
ctcgggtagtcaa

SEQ ID NO: 5926 - DNA, 13 bp, Artificial Sequence
  synthetic sequence
aggctgggccaac

SEQ ID NO: 5927 - DNA, 13 bp, Artificial Sequence
  synthetic sequence
ccacgagaccagc

SEQ ID NO: 5928 - DNA, 13 bp, Artificial Sequence
  synthetic sequence
ggtctgatctcca

SEQ ID NO: 5929 - DNA, 13 bp, Artificial Sequence
  synthetic sequence
aacatgagatatc

SEQ ID NO: 5930 - DNA, 13 bp, Artificial Sequence
  synthetic sequence
acagctcaaactg

SEQ ID NO: 5931 - DNA, 13 bp, Artificial Sequence
  synthetic sequence
acaagtgtgcgca

SEQ ID NO: 5932 - DNA, 13 bp, Artificial Sequence
  synthetic sequence
ttgtctggacctt

SEQ ID NO: 5933 - DNA, 13 bp, Artificial Sequence
  synthetic sequence
tccttcattttct

SEQ ID NO: 5934 - DNA, 13 bp, Artificial Sequence
  synthetic sequence
gccacttgccatg

SEQ ID NO: 5935 - DNA, 13 bp, Artificial Sequence
  synthetic sequence
gacgtgccacatc

SEQ ID NO: 5936 - DNA, 13 bp, Artificial Sequence
  synthetic sequence
gctgtgagatcat

SEQ ID NO: 5937 - DNA, 13 bp, Artificial Sequence
  synthetic sequence
tctggccagctcc

SEQ ID NO: 5938 - DNA, 13 bp, Artificial Sequence
  synthetic sequence
cacatccttggtc

SEQ ID NO: 5939 - DNA, 13 bp, Artificial Sequence
  synthetic sequence
atcagcagcattc

SEQ ID NO: 5940 - DNA, 13 bp, Artificial Sequence
  synthetic sequence
tcttcaaggatcc

SEQ ID NO: 5941 - DNA, 13 bp, Artificial Sequence
  synthetic sequence
tgaagcatggcgc

SEQ ID NO: 5942 - DNA, 13 bp, Artificial Sequence
  synthetic sequence
ctcctccgttatt

SEQ ID NO: 5943 - DNA, 13 bp, Artificial Sequence
  synthetic sequence
gtcaccacctgcc

SEQ ID NO: 5944 - DNA, 13 bp, Artificial Sequence
  synthetic sequence
caatgcgtcctct

SEQ ID NO: 5945 - DNA, 13 bp, Artificial Sequence
  synthetic sequence
ccatcattttcct

SEQ ID NO: 5946 - DNA, 13 bp, Artificial Sequence
  synthetic sequence
catcacagtccac

SEQ ID NO: 5947 - DNA, 13 bp, Artificial Sequence
  synthetic sequence
ttctctatcacat

SEQ ID NO: 5948 - DNA, 13 bp, Artificial Sequence
  synthetic sequence
ggtttcagatcca

SEQ ID NO: 5949 - DNA, 13 bp, Artificial Sequence
  synthetic sequence
gccacaatcacgg

SEQ ID NO: 5950 - DNA, 13 bp, Artificial Sequence
  synthetic sequence
ctggtcccagggc

SEQ ID NO: 5951 - DNA, 13 bp, Artificial Sequence
  synthetic sequence
catcactgcaaga

SEQ ID NO: 5952 - DNA, 13 bp, Artificial Sequence
  synthetic sequence
agtgccatcaggg

SEQ ID NO: 5953 - DNA, 13 bp, Artificial Sequence
  synthetic sequence
tctaccaccacgt

SEQ ID NO: 5954 - DNA, 13 bp, Artificial Sequence
  synthetic sequence
gccattctgaaat

SEQ ID NO: 5955 - DNA, 13 bp, Artificial Sequence
  synthetic sequence
ctaaggaaaaagg

SEQ ID NO: 5956 - DNA, 13 bp, Artificial Sequence
  synthetic sequence
ggcatcgcccctg

SEQ ID NO: 5957 - DNA, 13 bp, Artificial Sequence
  synthetic sequence
gcaggagggtctt

SEQ ID NO: 5958 - DNA, 13 bp, Artificial Sequence
  synthetic sequence
catgtacatggca

SEQ ID NO: 5959 - DNA, 13 bp, Artificial Sequence
  synthetic sequence
gtttctcatggcc

SEQ ID NO: 5960 - DNA, 13 bp, Artificial Sequence
  synthetic sequence
tgaattcagcctc

SEQ ID NO: 5961 - DNA, 13 bp, Artificial Sequence
  synthetic sequence
tgatgtctgttct

SEQ ID NO: 5962 - DNA, 13 bp, Artificial Sequence
  synthetic sequence
gtgtcatccgcat

SEQ ID NO: 5963 - DNA, 13 bp, Artificial Sequence
  synthetic sequence
gggagctcactca

SEQ ID NO: 5964 - DNA, 13 bp, Artificial Sequence
  synthetic sequence
ccaccacattttt

SEQ ID NO: 5965 - DNA, 13 bp, Artificial Sequence
  synthetic sequence
cttccataggcca

SEQ ID NO: 5966 - DNA, 13 bp, Artificial Sequence
  synthetic sequence
tggtgatggtatt

SEQ ID NO: 5967 - DNA, 13 bp, Artificial Sequence
  synthetic sequence
tatgcaatgggca

SEQ ID NO: 5968 - DNA, 13 bp, Artificial Sequence
  synthetic sequence
ttctggcacactc

SEQ ID NO: 5969 - DNA, 13 bp, Artificial Sequence
  synthetic sequence
cccaccaagccag

SEQ ID NO: 5970 - DNA, 13 bp, Artificial Sequence
  synthetic sequence
ccaccaatgccgc

SEQ ID NO: 5971 - DNA, 13 bp, Artificial Sequence
  synthetic sequence
acttttagattgg

SEQ ID NO: 5972 - DNA, 13 bp, Artificial Sequence
  synthetic sequence
actcctcctgata

SEQ ID NO: 5973 - DNA, 13 bp, Artificial Sequence
  synthetic sequence
tccttatccaatg

SEQ ID NO: 5974 - DNA, 13 bp, Artificial Sequence
  synthetic sequence
aggttccactggg

SEQ ID NO: 5975 - DNA, 13 bp, Artificial Sequence
  synthetic sequence
gctaaaatcccag

SEQ ID NO: 5976 - DNA, 13 bp, Artificial Sequence
  synthetic sequence
aactccgtgagga

SEQ ID NO: 5977 - DNA, 13 bp, Artificial Sequence
  synthetic sequence
ccctcttgtgaaa

SEQ ID NO: 5978 - DNA, 13 bp, Artificial Sequence
  synthetic sequence
gtacacacaggtc

SEQ ID NO: 5979 - DNA, 13 bp, Artificial Sequence
  synthetic sequence
gcaccttgtaacc

SEQ ID NO: 5980 - DNA, 13 bp, Artificial Sequence
  synthetic sequence
acaataggagatc

SEQ ID NO: 5981 - DNA, 13 bp, Artificial Sequence
  synthetic sequence
gtctaatctccat

SEQ ID NO: 5982 - DNA, 13 bp, Artificial Sequence
  synthetic sequence
gccatcaagggca

SEQ ID NO: 5983 - DNA, 13 bp, Artificial Sequence
  synthetic sequence
gctgcccagcctc

SEQ ID NO: 5984 - DNA, 13 bp, Artificial Sequence
  synthetic sequence
accatccattgca

SEQ ID NO: 5985 - DNA, 13 bp, Artificial Sequence
  synthetic sequence
gtctcctccattg

SEQ ID NO: 5986 - DNA, 13 bp, Artificial Sequence
  synthetic sequence
cgcattatccccc

SEQ ID NO: 5987 - DNA, 13 bp, Artificial Sequence
  synthetic sequence
aacatgaggtatc

SEQ ID NO: 5988 - DNA, 13 bp, Artificial Sequence
  synthetic sequence
gtagatgttcttt

SEQ ID NO: 5989 - DNA, 13 bp, Artificial Sequence
  synthetic sequence
tgacagggcatca

SEQ ID NO: 5990 - DNA, 13 bp, Artificial Sequence
  synthetic sequence
tccgaccaaagcc

SEQ ID NO: 5991 - DNA, 13 bp, Artificial Sequence
  synthetic sequence
caggaatatgatt

SEQ ID NO: 5992 - DNA, 13 bp, Artificial Sequence
  synthetic sequence
tgggaagtctcag

SEQ ID NO: 5993 - DNA, 13 bp, Artificial Sequence
  synthetic sequence
cccagggccaaca

SEQ ID NO: 5994 - DNA, 13 bp, Artificial Sequence
  synthetic sequence
ggagtccggttct

SEQ ID NO: 5995 - DNA, 13 bp, Artificial Sequence
  synthetic sequence
caatgggtgaacc

SEQ ID NO: 5996 - DNA, 13 bp, Artificial Sequence
  synthetic sequence
ccagcagagctga

SEQ ID NO: 5997 - DNA, 13 bp, Artificial Sequence
  synthetic sequence
ccgtgagaaccac

SEQ ID NO: 5998 - DNA, 13 bp, Artificial Sequence
  synthetic sequence
aaacaggcaggtc

SEQ ID NO: 5999 - DNA, 13 bp, Artificial Sequence
  synthetic sequence
atcaccatgctca

SEQ ID NO: 6000 - DNA, 13 bp, Artificial Sequence
  synthetic sequence
aatcctccccctt

SEQ ID NO: 6001 - DNA, 13 bp, Artificial Sequence
  synthetic sequence
atgtggccctgtt

SEQ ID NO: 6002 - DNA, 13 bp, Artificial Sequence
  synthetic sequence
gggggatcactgt

SEQ ID NO: 6003 - DNA, 13 bp, Artificial Sequence
  synthetic sequence
atgccttcggcta

SEQ ID NO: 6004 - DNA, 13 bp, Artificial Sequence
  synthetic sequence
gtctaatttccat

SEQ ID NO: 6005 - DNA, 13 bp, Artificial Sequence
  synthetic sequence
tcatgggcttttc

SEQ ID NO: 6006 - DNA, 13 bp, Artificial Sequence
  synthetic sequence
accagatggcttt

SEQ ID NO: 6007 - DNA, 13 bp, Artificial Sequence
  synthetic sequence
acctgccaggata

SEQ ID NO: 6008 - DNA, 13 bp, Artificial Sequence
  synthetic sequence
tacagctcaaatt

SEQ ID NO: 6009 - DNA, 13 bp, Artificial Sequence
  synthetic sequence
gtcagttatccca

SEQ ID NO: 6010 - DNA, 17 bp, Artificial Sequence
  synthetic sequence
ggtctgcaaatcgagtt

SEQ ID NO: 6011 - DNA, 17 bp, Artificial Sequence
  synthetic sequence
gagaaccggactccaca

SEQ ID NO: 6012 - DNA, 17 bp, Artificial Sequence
  synthetic sequence
ggatttcattgaggggg

SEQ ID NO: 6013 - DNA, 17 bp, Artificial Sequence
  synthetic sequence
aaagcgcagcagtcaaa

SEQ ID NO: 6014 - DNA, 17 bp, Artificial Sequence
  synthetic sequence
tatgacaatgacaaccc

SEQ ID NO: 6015 - DNA, 17 bp, Artificial Sequence
  synthetic sequence
gcaacaatcttgatgac

SEQ ID NO: 6016 - DNA, 17 bp, Artificial Sequence
  synthetic sequence
gtgtttggctctgcctt

SEQ ID NO: 6017 - DNA, 17 bp, Artificial Sequence
  synthetic sequence
gaagggaaggtggacac

SEQ ID NO: 6018 - DNA, 17 bp, Artificial Sequence
  synthetic sequence
ctgctcatcggctttgg

SEQ ID NO: 6019 - DNA, 17 bp, Artificial Sequence
  synthetic sequence
gagggaaacaccagcct

SEQ ID NO: 6020 - DNA, 17 bp, Artificial Sequence
  synthetic sequence
gcagagatggtgataca

SEQ ID NO: 6021 - DNA, 17 bp, Artificial Sequence
  synthetic sequence
tttagagactctgatga

SEQ ID NO: 6022 - DNA, 17 bp, Artificial Sequence
  synthetic sequence
tgggagaatgtgccctt

SEQ ID NO: 6023 - DNA, 17 bp, Artificial Sequence
  synthetic sequence
tctgatagaggctgggg

SEQ ID NO: 6024 - DNA, 17 bp, Artificial Sequence
  synthetic sequence
cagaagaaacctgactt

SEQ ID NO: 6025 - DNA, 17 bp, Artificial Sequence
  synthetic sequence
catggtcgattcatggg

SEQ ID NO: 6026 - DNA, 17 bp, Artificial Sequence
  synthetic sequence
atgctcatattctttgt

SEQ ID NO: 6027 - DNA, 17 bp, Artificial Sequence
  synthetic sequence
accttgatgatgaacag

SEQ ID NO: 6028 - DNA, 17 bp, Artificial Sequence
  synthetic sequence
tggagaacttccttggt

SEQ ID NO: 6029 - DNA, 17 bp, Artificial Sequence
  synthetic sequence
gtgatcaggaaccctct

SEQ ID NO: 6030 - DNA, 17 bp, Artificial Sequence
  synthetic sequence
catccattttccagaat

SEQ ID NO: 6031 - DNA, 17 bp, Artificial Sequence
  synthetic sequence
aacagatggttgctcct

SEQ ID NO: 6032 - DNA, 17 bp, Artificial Sequence
  synthetic sequence
atcatgaaagttgtcaa

SEQ ID NO: 6033 - DNA, 17 bp, Artificial Sequence
  synthetic sequence
tggatgcaggtaccact

SEQ ID NO: 6034 - DNA, 17 bp, Artificial Sequence
  synthetic sequence
tcagagtttgggaaagc

SEQ ID NO: 6035 - DNA, 17 bp, Artificial Sequence
  synthetic sequence
gctggagaaatacatgc

SEQ ID NO: 6036 - DNA, 17 bp, Artificial Sequence
  synthetic sequence
tgccaggtgcaaactgc

SEQ ID NO: 6037 - DNA, 17 bp, Artificial Sequence
  synthetic sequence
aaaaagagtgcccatgg

SEQ ID NO: 6038 - DNA, 17 bp, Artificial Sequence
  synthetic sequence
ttgaagacccggcaaga

SEQ ID NO: 6039 - DNA, 17 bp, Artificial Sequence
  synthetic sequence
acaatgctctctccaat

SEQ ID NO: 6040 - DNA, 17 bp, Artificial Sequence
  synthetic sequence
gtccttgctgggtggct

SEQ ID NO: 6041 - DNA, 17 bp, Artificial Sequence
  synthetic sequence
aacggagaggtgattgg

SEQ ID NO: 6042 - DNA, 17 bp, Artificial Sequence
  synthetic sequence
ggtgttttgaaggccct

SEQ ID NO: 6043 - DNA, 17 bp, Artificial Sequence
  synthetic sequence
tccactctgaggaaggc

SEQ ID NO: 6044 - DNA, 17 bp, Artificial Sequence
  synthetic sequence
aatggcaagaagttgat

SEQ ID NO: 6045 - DNA, 17 bp, Artificial Sequence
  synthetic sequence
atccatcgtatccgaac

SEQ ID NO: 6046 - DNA, 17 bp, Artificial Sequence
  synthetic sequence
ctgagcctacaagtgaa

SEQ ID NO: 6047 - DNA, 17 bp, Artificial Sequence
  synthetic sequence
gacaacaacctttacaa

SEQ ID NO: 6048 - DNA, 17 bp, Artificial Sequence
  synthetic sequence
ggttgttctttctgaaa

SEQ ID NO: 6049 - DNA, 17 bp, Artificial Sequence
  synthetic sequence
ttatcataggggtcctt

SEQ ID NO: 6050 - DNA, 17 bp, Artificial Sequence
  synthetic sequence
aaggcattttggttaca

SEQ ID NO: 6051 - DNA, 17 bp, Artificial Sequence
  synthetic sequence
cttcaaggacaaaactg

SEQ ID NO: 6052 - DNA, 17 bp, Artificial Sequence
  synthetic sequence
aaggatttatctttttc

SEQ ID NO: 6053 - DNA, 17 bp, Artificial Sequence
  synthetic sequence
tatggcaatggaattct

SEQ ID NO: 6054 - DNA, 17 bp, Artificial Sequence
  synthetic sequence
ctctctgaaatgaagga

SEQ ID NO: 6055 - DNA, 17 bp, Artificial Sequence
  synthetic sequence
gtgaatggaaagaagag

SEQ ID NO: 6056 - DNA, 17 bp, Artificial Sequence
  synthetic sequence
gcttggactgtctatgt

SEQ ID NO: 6057 - DNA, 17 bp, Artificial Sequence
  synthetic sequence
catctgaggaccttggg

SEQ ID NO: 6058 - DNA, 17 bp, Artificial Sequence
  synthetic sequence
gagcccacaagtgaaga

SEQ ID NO: 6059 - DNA, 17 bp, Artificial Sequence
  synthetic sequence
tggatgcaggtgccact

SEQ ID NO: 6060 - DNA, 17 bp, Artificial Sequence
  synthetic sequence
ggatgggacacacgcat

SEQ ID NO: 6061 - DNA, 17 bp, Artificial Sequence
  synthetic sequence
gaccgaaagtggtgctt

SEQ ID NO: 6062 - DNA, 17 bp, Artificial Sequence
  synthetic sequence
cgtggtctgttcatggg

SEQ ID NO: 6063 - DNA, 17 bp, Artificial Sequence
  synthetic sequence
aatccaatagcctccac

SEQ ID NO: 6064 - DNA, 17 bp, Artificial Sequence
  synthetic sequence
aaggttgtcaataggtg

SEQ ID NO: 6065 - DNA, 17 bp, Artificial Sequence
  synthetic sequence
ttgagaaagaatacccc

SEQ ID NO: 6066 - DNA, 17 bp, Artificial Sequence
  synthetic sequence
tggttcttgctggctgg

SEQ ID NO: 6067 - DNA, 17 bp, Artificial Sequence
  synthetic sequence
cagaccgcagtggactt

SEQ ID NO: 6068 - DNA, 17 bp, Artificial Sequence
  synthetic sequence
tggaacatcatcacttt

SEQ ID NO: 6069 - DNA, 17 bp, Artificial Sequence
  synthetic sequence
tgcactgtggttatcat

SEQ ID NO: 6070 - DNA, 17 bp, Artificial Sequence
  synthetic sequence
cctgggcctcagtcaag

SEQ ID NO: 6071 - DNA, 17 bp, Artificial Sequence
  synthetic sequence
atacaccgcatccggac

SEQ ID NO: 6072 - DNA, 17 bp, Artificial Sequence
  synthetic sequence
agagattcagatgactg

SEQ ID NO: 6073 - DNA, 17 bp, Artificial Sequence
  synthetic sequence
tggggaagagagaaaag

SEQ ID NO: 6074 - DNA, 17 bp, Artificial Sequence
  synthetic sequence
ggtccagtcgcagttgg

SEQ ID NO: 6075 - DNA, 17 bp, Artificial Sequence
  synthetic sequence
cctttctgctctcacca

SEQ ID NO: 6076 - DNA, 17 bp, Artificial Sequence
  synthetic sequence
ttgatggtggttgtggt

SEQ ID NO: 6077 - DNA, 17 bp, Artificial Sequence
  synthetic sequence
cccacacatgaaaatca

SEQ ID NO: 6078 - DNA, 17 bp, Artificial Sequence
  synthetic sequence
gtgacggctggagagat

SEQ ID NO: 6079 - DNA, 17 bp, Artificial Sequence
  synthetic sequence
gacacaaataacagcaa

SEQ ID NO: 6080 - DNA, 17 bp, Artificial Sequence
  synthetic sequence
gaatacaccgccacttg

SEQ ID NO: 6081 - DNA, 17 bp, Artificial Sequence
  synthetic sequence
aggatttattttcttct

SEQ ID NO: 6082 - DNA, 17 bp, Artificial Sequence
  synthetic sequence
aatgaaagtgcaacaat

SEQ ID NO: 6083 - DNA, 17 bp, Artificial Sequence
  synthetic sequence
ccatggatgcaagtccc

SEQ ID NO: 6084 - DNA, 17 bp, Artificial Sequence
  synthetic sequence
tgtcaggtccagactgc

SEQ ID NO: 6085 - DNA, 17 bp, Artificial Sequence
  synthetic sequence
aatggttgtggcctgtt

SEQ ID NO: 6086 - DNA, 17 bp, Artificial Sequence
  synthetic sequence
tggacactatcagcgtg

SEQ ID NO: 6087 - DNA, 17 bp, Artificial Sequence
  synthetic sequence
aattctacccacgagat

SEQ ID NO: 6088 - DNA, 17 bp, Artificial Sequence
  synthetic sequence
gtgatacatcaccaaca

SEQ ID NO: 6089 - DNA, 17 bp, Artificial Sequence
  synthetic sequence
ttgtcctcatggtcgtc

SEQ ID NO: 6090 - DNA, 17 bp, Artificial Sequence
  synthetic sequence
aatgacaacaacttgta

SEQ ID NO: 6091 - DNA, 17 bp, Artificial Sequence
  synthetic sequence
ggtgtccatgggggcac

SEQ ID NO: 6092 - DNA, 17 bp, Artificial Sequence
  synthetic sequence
agaggctggggcaatgg

SEQ ID NO: 6093 - DNA, 17 bp, Artificial Sequence
  synthetic sequence
aacatgatgggaaagag

SEQ ID NO: 6094 - DNA, 17 bp, Artificial Sequence
  synthetic sequence
atacatccatttgccct

SEQ ID NO: 6095 - DNA, 17 bp, Artificial Sequence
  synthetic sequence
ccatggataccatcagt

SEQ ID NO: 6096 - DNA, 17 bp, Artificial Sequence
  synthetic sequence
gttattataggggtcct

SEQ ID NO: 6097 - DNA, 17 bp, Artificial Sequence
  synthetic sequence
tccagaatacgtgatgg

SEQ ID NO: 6098 - DNA, 17 bp, Artificial Sequence
  synthetic sequence
tgtcagcccagaaaccc

SEQ ID NO: 6099 - DNA, 17 bp, Artificial Sequence
  synthetic sequence
cacagctcgccgacacc

SEQ ID NO: 6100 - DNA, 17 bp, Artificial Sequence
  synthetic sequence
gcaatcaataaaggtat

SEQ ID NO: 6101 - DNA, 17 bp, Artificial Sequence
  synthetic sequence
attattacctttaagga

SEQ ID NO: 6102 - DNA, 17 bp, Artificial Sequence
  synthetic sequence
cagcaatcaaagctggc

SEQ ID NO: 6103 - DNA, 17 bp, Artificial Sequence
  synthetic sequence
accagtgaggacaatgc

SEQ ID NO: 6104 - DNA, 17 bp, Artificial Sequence
  synthetic sequence
tggaatattgtgacttt

SEQ ID NO: 6105 - DNA, 17 bp, Artificial Sequence
  synthetic sequence
accatacttatgaccgc

SEQ ID NO: 6106 - DNA, 17 bp, Artificial Sequence
  synthetic sequence
actgtcaatcctattgc

SEQ ID NO: 6107 - DNA, 17 bp, Artificial Sequence
  synthetic sequence
aaaactttttgggtcca

SEQ ID NO: 6108 - DNA, 17 bp, Artificial Sequence
  synthetic sequence
ggtgcccagtggaagga

SEQ ID NO: 6109 - DNA, 17 bp, Artificial Sequence
  synthetic sequence
ctgttgtcataataggg

SEQ ID NO: 6110 - DNA, 17 bp, Artificial Sequence
  synthetic sequence
agaagaaaccggatttc

SEQ ID NO: 6111 - DNA, 17 bp, Artificial Sequence
  synthetic sequence
ggcctgctcatgggctt

SEQ ID NO: 6112 - DNA, 17 bp, Artificial Sequence
  synthetic sequence
ttgtggaatggacccat

SEQ ID NO: 6113 - DNA, 17 bp, Artificial Sequence
  synthetic sequence
ctgaagctgaaatggtg

SEQ ID NO: 6114 - DNA, 17 bp, Artificial Sequence
  synthetic sequence
tgacggattgcagtatg

SEQ ID NO: 6115 - DNA, 17 bp, Artificial Sequence
  synthetic sequence
ttgggcttctgtgaagg

SEQ ID NO: 6116 - DNA, 17 bp, Artificial Sequence
  synthetic sequence
cagggttgttttgtcag

SEQ ID NO: 6117 - DNA, 17 bp, Artificial Sequence
  synthetic sequence
ggacagtctatgtggga

SEQ ID NO: 6118 - DNA, 17 bp, Artificial Sequence
  synthetic sequence
ttgaggggaacactagt

SEQ ID NO: 6119 - DNA, 17 bp, Artificial Sequence
  synthetic sequence
ccatggactaaagactc

SEQ ID NO: 6120 - DNA, 17 bp, Artificial Sequence
  synthetic sequence
atctgtgggaaaaggaa

SEQ ID NO: 6121 - DNA, 17 bp, Artificial Sequence
  synthetic sequence
caggagaagttcatgca

SEQ ID NO: 6122 - DNA, 17 bp, Artificial Sequence
  synthetic sequence
ggaagatcatgaaggtg

SEQ ID NO: 6123 - DNA, 17 bp, Artificial Sequence
  synthetic sequence
agagaagttcacagact

SEQ ID NO: 6124 - DNA, 17 bp, Artificial Sequence
  synthetic sequence
ggacacacgcatcacag

SEQ ID NO: 6125 - DNA, 17 bp, Artificial Sequence
  synthetic sequence
acatggcacgacgacac

SEQ ID NO: 6126 - DNA, 17 bp, Artificial Sequence
  synthetic sequence
caatgaccgcaaatggt

SEQ ID NO: 6127 - DNA, 17 bp, Artificial Sequence
  synthetic sequence
gtgtttggttctgcctt

SEQ ID NO: 6128 - DNA, 17 bp, Artificial Sequence
  synthetic sequence
ctgctcatcggcttcgg

SEQ ID NO: 6129 - DNA, 17 bp, Artificial Sequence
  synthetic sequence
aatgagggttacaaagg

SEQ ID NO: 6130 - DNA, 17 bp, Artificial Sequence
  synthetic sequence
tggtctgcagtatggtt

SEQ ID NO: 6131 - DNA, 17 bp, Artificial Sequence
  synthetic sequence
tgcactctgaggaaggt

SEQ ID NO: 6132 - DNA, 17 bp, Artificial Sequence
  synthetic sequence
cggtaatcaggaatccc

SEQ ID NO: 6133 - DNA, 17 bp, Artificial Sequence
  synthetic sequence
ccgtcatcaggaatcct

SEQ ID NO: 6134 - DNA, 17 bp, Artificial Sequence
  synthetic sequence
cccacacatgaaaacca

SEQ ID NO: 6135 - DNA, 17 bp, Artificial Sequence
  synthetic sequence
tgctcccaccacttcca

SEQ ID NO: 6136 - DNA, 17 bp, Artificial Sequence
  synthetic sequence
acagctgaggacttggg

SEQ ID NO: 6137 - DNA, 17 bp, Artificial Sequence
  synthetic sequence
ggtgctttgaaggaccc

SEQ ID NO: 6138 - DNA, 17 bp, Artificial Sequence
  synthetic sequence
tggagggtctcctctaa

SEQ ID NO: 6139 - DNA, 17 bp, Artificial Sequence
  synthetic sequence
tcatccaaaggtctgct

SEQ ID NO: 6140 - DNA, 17 bp, Artificial Sequence
  synthetic sequence
atggctgccattcagat

SEQ ID NO: 6141 - DNA, 17 bp, Artificial Sequence
  synthetic sequence
gtgtattcaaagactgc

SEQ ID NO: 6142 - DNA, 17 bp, Artificial Sequence
  synthetic sequence
gctggtggatcctttgc

SEQ ID NO: 6143 - DNA, 17 bp, Artificial Sequence
  synthetic sequence
caatgcgccccctcctt

SEQ ID NO: 6144 - DNA, 17 bp, Artificial Sequence
  synthetic sequence
accaccacactctttcc

SEQ ID NO: 6145 - DNA, 17 bp, Artificial Sequence
  synthetic sequence
ccaaacctcctttggag

SEQ ID NO: 6146 - DNA, 17 bp, Artificial Sequence
  synthetic sequence
cgtcaatatggtcccac

SEQ ID NO: 6147 - DNA, 17 bp, Artificial Sequence
  synthetic sequence
tctctcttgccaaagtt

SEQ ID NO: 6148 - DNA, 17 bp, Artificial Sequence
  synthetic sequence
gggagttcactcagcac

SEQ ID NO: 6149 - DNA, 17 bp, Artificial Sequence
  synthetic sequence
gtgacatgccacattgt

SEQ ID NO: 6150 - DNA, 17 bp, Artificial Sequence
  synthetic sequence
agccttggccacttgcc

SEQ ID NO: 6151 - DNA, 17 bp, Artificial Sequence
  synthetic sequence
ttggtcattccaatcag

SEQ ID NO: 6152 - DNA, 17 bp, Artificial Sequence
  synthetic sequence
ggtttgacgcctccaag

SEQ ID NO: 6153 - DNA, 17 bp, Artificial Sequence
  synthetic sequence
caggtgtcaacagagcc

SEQ ID NO: 6154 - DNA, 17 bp, Artificial Sequence
  synthetic sequence
ccaccatccattgcagc

SEQ ID NO: 6155 - DNA, 17 bp, Artificial Sequence
  synthetic sequence
gctaggacaatgccttc

SEQ ID NO: 6156 - DNA, 17 bp, Artificial Sequence
  synthetic sequence
gacctgcctgctgagtc

SEQ ID NO: 6157 - DNA, 17 bp, Artificial Sequence
  synthetic sequence
tacacacaagtccgaca

SEQ ID NO: 6158 - DNA, 17 bp, Artificial Sequence
  synthetic sequence
cagtcctgccagcactc

SEQ ID NO: 6159 - DNA, 17 bp, Artificial Sequence
  synthetic sequence
cagactttgcacattca

SEQ ID NO: 6160 - DNA, 17 bp, Artificial Sequence
  synthetic sequence
accaaggtcactccacc

SEQ ID NO: 6161 - DNA, 17 bp, Artificial Sequence
  synthetic sequence
gaggtcatcacaacctg

SEQ ID NO: 6162 - DNA, 17 bp, Artificial Sequence
  synthetic sequence
gcagcaatcaacgccat

SEQ ID NO: 6163 - DNA, 17 bp, Artificial Sequence
  synthetic sequence
aatgcagtgagctgagt

SEQ ID NO: 6164 - DNA, 17 bp, Artificial Sequence
  synthetic sequence
catcagctactatcact

SEQ ID NO: 6165 - DNA, 17 bp, Artificial Sequence
  synthetic sequence
tccacctccacaatgtc

SEQ ID NO: 6166 - DNA, 17 bp, Artificial Sequence
  synthetic sequence
aacattctttggatcct

SEQ ID NO: 6167 - DNA, 17 bp, Artificial Sequence
  synthetic sequence
tcaagatccggccaact

SEQ ID NO: 6168 - DNA, 17 bp, Artificial Sequence
  synthetic sequence
tcatgtcccttttgtga

SEQ ID NO: 6169 - DNA, 17 bp, Artificial Sequence
  synthetic sequence
tttcaaggagccttcct

SEQ ID NO: 6170 - DNA, 17 bp, Artificial Sequence
  synthetic sequence
ggagtccggttctccag

SEQ ID NO: 6171 - DNA, 17 bp, Artificial Sequence
  synthetic sequence
tttcttctatggcctct

SEQ ID NO: 6172 - DNA, 17 bp, Artificial Sequence
  synthetic sequence
accctatgccacagagc

SEQ ID NO: 6173 - DNA, 17 bp, Artificial Sequence
  synthetic sequence
cctgacagggcatcaaa

SEQ ID NO: 6174 - DNA, 17 bp, Artificial Sequence
  synthetic sequence
agtcaagagcgacagcc

SEQ ID NO: 6175 - DNA, 17 bp, Artificial Sequence
  synthetic sequence
ttcagagcataagtcac

SEQ ID NO: 6176 - DNA, 17 bp, Artificial Sequence
  synthetic sequence
ccagggatatgattgtg

SEQ ID NO: 6177 - DNA, 17 bp, Artificial Sequence
  synthetic sequence
aagagtgcgcaagcgtc

SEQ ID NO: 6178 - DNA, 17 bp, Artificial Sequence
  synthetic sequence
tagctctgtgcgctgcc

SEQ ID NO: 6179 - DNA, 17 bp, Artificial Sequence
  synthetic sequence
ctcccatgacggccagg

SEQ ID NO: 6180 - DNA, 17 bp, Artificial Sequence
  synthetic sequence
ttctcttcagctaggtg

SEQ ID NO: 6181 - DNA, 17 bp, Artificial Sequence
  synthetic sequence
ccttggcctaatttcca

SEQ ID NO: 6182 - DNA, 17 bp, Artificial Sequence
  synthetic sequence
gtggatgtgagatgccc

SEQ ID NO: 6183 - DNA, 17 bp, Artificial Sequence
  synthetic sequence
accctctcttcaatggc

SEQ ID NO: 6184 - DNA, 17 bp, Artificial Sequence
  synthetic sequence
agcctcatgtccctctt

SEQ ID NO: 6185 - DNA, 17 bp, Artificial Sequence
  synthetic sequence
tacccagtgaactcggc

SEQ ID NO: 6186 - DNA, 17 bp, Artificial Sequence
  synthetic sequence
tgccacatcgtgtggaa

SEQ ID NO: 6187 - DNA, 17 bp, Artificial Sequence
  synthetic sequence
gaataggctgggccaac

SEQ ID NO: 6188 - DNA, 17 bp, Artificial Sequence
  synthetic sequence
gctgaatcacacttgcc

SEQ ID NO: 6189 - DNA, 17 bp, Artificial Sequence
  synthetic sequence
actcccacgagaccagc

SEQ ID NO: 6190 - DNA, 17 bp, Artificial Sequence
  synthetic sequence
gaagcatggcgcatcca

SEQ ID NO: 6191 - DNA, 17 bp, Artificial Sequence
  synthetic sequence
ctcgggtagtcaagggc

SEQ ID NO: 6192 - DNA, 17 bp, Artificial Sequence
  synthetic sequence
cctctggctgctatgct

SEQ ID NO: 6193 - DNA, 17 bp, Artificial Sequence
  synthetic sequence
caagtgtgcgcaaccgt

SEQ ID NO: 6194 - DNA, 17 bp, Artificial Sequence
  synthetic sequence
atgtctgtccgtttata

SEQ ID NO: 6195 - DNA, 17 bp, Artificial Sequence
  synthetic sequence
ccaccactgagatgtct

SEQ ID NO: 6196 - DNA, 17 bp, Artificial Sequence
  synthetic sequence
ccttcctttccaagggt

SEQ ID NO: 6197 - DNA, 17 bp, Artificial Sequence
  synthetic sequence
catgtgttttccttggc

SEQ ID NO: 6198 - DNA, 17 bp, Artificial Sequence
  synthetic sequence
cacctgccctgctgatg

SEQ ID NO: 6199 - DNA, 17 bp, Artificial Sequence
  synthetic sequence
gccagcacaatgccttc

SEQ ID NO: 6200 - DNA, 17 bp, Artificial Sequence
  synthetic sequence
gcatagaatccaccacc

SEQ ID NO: 6201 - DNA, 17 bp, Artificial Sequence
  synthetic sequence
tctccttcattttcttc

SEQ ID NO: 6202 - DNA, 17 bp, Artificial Sequence
  synthetic sequence
cagcatcccccatgacg

SEQ ID NO: 6203 - DNA, 17 bp, Artificial Sequence
  synthetic sequence
tcatgtgtcttctttgg

SEQ ID NO: 6204 - DNA, 17 bp, Artificial Sequence
  synthetic sequence
aaacaggcaggtcacag

SEQ ID NO: 6205 - DNA, 17 bp, Artificial Sequence
  synthetic sequence
catcagcagcattccca

SEQ ID NO: 6206 - DNA, 17 bp, Artificial Sequence
  synthetic sequence
tcaaagtctggccagct

SEQ ID NO: 6207 - DNA, 17 bp, Artificial Sequence
  synthetic sequence
tacatggcatcccctcc

SEQ ID NO: 6208 - DNA, 17 bp, Artificial Sequence
  synthetic sequence
gctgtgagatcatcggc

SEQ ID NO: 6209 - DNA, 17 bp, Artificial Sequence
  synthetic sequence
ttcaggttggtgatggt

SEQ ID NO: 6210 - DNA, 17 bp, Artificial Sequence
  synthetic sequence
ttgtgggagctaactgg

SEQ ID NO: 6211 - DNA, 17 bp, Artificial Sequence
  synthetic sequence
tgatcccatggcacctt

SEQ ID NO: 6212 - DNA, 17 bp, Artificial Sequence
  synthetic sequence
ccaagggctaacacttt

SEQ ID NO: 6213 - DNA, 17 bp, Artificial Sequence
  synthetic sequence
tcaccatcattttcctc

SEQ ID NO: 6214 - DNA, 17 bp, Artificial Sequence
  synthetic sequence
ttttatcccggtttcag

SEQ ID NO: 6215 - DNA, 17 bp, Artificial Sequence
  synthetic sequence
tggggagtccggttctc

SEQ ID NO: 6216 - DNA, 17 bp, Artificial Sequence
  synthetic sequence
ccatcacagtccactga

SEQ ID NO: 6217 - DNA, 17 bp, Artificial Sequence
  synthetic sequence
ccacaatcacgggaatc

SEQ ID NO: 6218 - DNA, 17 bp, Artificial Sequence
  synthetic sequence
tggtcccagggcacttt

SEQ ID NO: 6219 - DNA, 17 bp, Artificial Sequence
  synthetic sequence
acagagccatgaggggc

SEQ ID NO: 6220 - DNA, 17 bp, Artificial Sequence
  synthetic sequence
acagcacatccttggtc

SEQ ID NO: 6221 - DNA, 17 bp, Artificial Sequence
  synthetic sequence
tcacccatcactgcaag

SEQ ID NO: 6222 - DNA, 17 bp, Artificial Sequence
  synthetic sequence
gagagcggtcttcaagg

SEQ ID NO: 6223 - DNA, 17 bp, Artificial Sequence
  synthetic sequence
ctttctaccaccacgtg

SEQ ID NO: 6224 - DNA, 17 bp, Artificial Sequence
  synthetic sequence
agatgttctttgggtct

SEQ ID NO: 6225 - DNA, 17 bp, Artificial Sequence
  synthetic sequence
aaacatgagatatccac

SEQ ID NO: 6226 - DNA, 17 bp, Artificial Sequence
  synthetic sequence
ccattctgaaatgtcct

SEQ ID NO: 6227 - DNA, 17 bp, Artificial Sequence
  synthetic sequence
ccagtgaattcagcctc

SEQ ID NO: 6228 - DNA, 17 bp, Artificial Sequence
  synthetic sequence
tcatggccatctctgcc

SEQ ID NO: 6229 - DNA, 17 bp, Artificial Sequence
  synthetic sequence
gtgccatcagggggagg

SEQ ID NO: 6230 - DNA, 17 bp, Artificial Sequence
  synthetic sequence
ccgctaaggaaaaaggg

SEQ ID NO: 6231 - DNA, 17 bp, Artificial Sequence
  synthetic sequence
ccagtttctctatcaca

SEQ ID NO: 6232 - DNA, 17 bp, Artificial Sequence
  synthetic sequence
tatgctagctggatcca

SEQ ID NO: 6233 - DNA, 17 bp, Artificial Sequence
  synthetic sequence
ccagcaggagggtcttt

SEQ ID NO: 6234 - DNA, 17 bp, Artificial Sequence
  synthetic sequence
cgtccaatgcgtcctct

SEQ ID NO: 6235 - DNA, 17 bp, Artificial Sequence
  synthetic sequence
tacatggcatctcctcc

SEQ ID NO: 6236 - DNA, 17 bp, Artificial Sequence
  synthetic sequence
ttggttatggtgttgag

SEQ ID NO: 6237 - DNA, 17 bp, Artificial Sequence
  synthetic sequence
ttctcgagaacatctgg

SEQ ID NO: 6238 - DNA, 17 bp, Artificial Sequence
  synthetic sequence
actcccaccaagccagc

SEQ ID NO: 6239 - DNA, 17 bp, Artificial Sequence
  synthetic sequence
gagcctgaggttccact

SEQ ID NO: 6240 - DNA, 17 bp, Artificial Sequence
  synthetic sequence
cttcaactaggtgagcc

SEQ ID NO: 6241 - DNA, 17 bp, Artificial Sequence
  synthetic sequence
ccttgtaacccgggatg

SEQ ID NO: 6242 - DNA, 17 bp, Artificial Sequence
  synthetic sequence
tccaccaatgccgcaca

SEQ ID NO: 6243 - DNA, 17 bp, Artificial Sequence
  synthetic sequence
atgagccgcccagcctc

SEQ ID NO: 6244 - DNA, 17 bp, Artificial Sequence
  synthetic sequence
agatatccacagccggc

SEQ ID NO: 6245 - DNA, 17 bp, Artificial Sequence
  synthetic sequence
tacgctggaccaaccgc

SEQ ID NO: 6246 - DNA, 17 bp, Artificial Sequence
  synthetic sequence
atcacatcttccatagg

SEQ ID NO: 6247 - DNA, 17 bp, Artificial Sequence
  synthetic sequence
gccaacaaacccagtaa

SEQ ID NO: 6248 - DNA, 17 bp, Artificial Sequence
  synthetic sequence
tctggcacactccgcca

SEQ ID NO: 6249 - DNA, 17 bp, Artificial Sequence
  synthetic sequence
tcactaggtggctgtcg

SEQ ID NO: 6250 - DNA, 17 bp, Artificial Sequence
  synthetic sequence
aggccaactccatggga

SEQ ID NO: 6251 - DNA, 17 bp, Artificial Sequence
  synthetic sequence
atagcatccttatccaa

SEQ ID NO: 6252 - DNA, 17 bp, Artificial Sequence
  synthetic sequence
gccaaccacactggcaa

SEQ ID NO: 6253 - DNA, 17 bp, Artificial Sequence
  synthetic sequence
taaaaccctccaccttc

SEQ ID NO: 6254 - DNA, 17 bp, Artificial Sequence
  synthetic sequence
ctgatgaagtttgcgtt

SEQ ID NO: 6255 - DNA, 17 bp, Artificial Sequence
  synthetic sequence
cgctttccgcagcgagg

SEQ ID NO: 6256 - DNA, 17 bp, Artificial Sequence
  synthetic sequence
tcgggcaactccgtgag

SEQ ID NO: 6257 - DNA, 17 bp, Artificial Sequence
  synthetic sequence
tctgggagctcactcag

SEQ ID NO: 6258 - DNA, 17 bp, Artificial Sequence
  synthetic sequence
gcgtctcccatgacagc

SEQ ID NO: 6259 - DNA, 17 bp, Artificial Sequence
  synthetic sequence
tcaggttagtgatggtg

SEQ ID NO: 6260 - DNA, 17 bp, Artificial Sequence
  synthetic sequence
atgtacaaggtccagtt

SEQ ID NO: 6261 - DNA, 17 bp, Artificial Sequence
  synthetic sequence
agcctcatatccctctt

SEQ ID NO: 6262 - DNA, 17 bp, Artificial Sequence
  synthetic sequence
tctccgtgcacactcag

SEQ ID NO: 6263 - DNA, 17 bp, Artificial Sequence
  synthetic sequence
tctgcttattcttgagc

SEQ ID NO: 6264 - DNA, 17 bp, Artificial Sequence
  synthetic sequence
agtctcagaaaccaggt

SEQ ID NO: 6265 - DNA, 17 bp, Artificial Sequence
  synthetic sequence
agaaacatgaggtatcc

SEQ ID NO: 6266 - DNA, 17 bp, Artificial Sequence
  synthetic sequence
accaccacactcttccc

SEQ ID NO: 6267 - DNA, 17 bp, Artificial Sequence
  synthetic sequence
taagtcactacctgccc

SEQ ID NO: 6268 - DNA, 17 bp, Artificial Sequence
  synthetic sequence
ttatcccggtttctgtt

SEQ ID NO: 6269 - DNA, 17 bp, Artificial Sequence
  synthetic sequence
ctcccccttctttggtg

SEQ ID NO: 6270 - DNA, 13 bp, Artificial Sequence
  synthetic sequence
acttgggttgtgt

SEQ ID NO: 6271 - DNA, 13 bp, Artificial Sequence
  synthetic sequence
ggcctggttggca

SEQ ID NO: 6272 - DNA, 13 bp, Artificial Sequence
  synthetic sequence
gccactgtgagag

SEQ ID NO: 6273 - DNA, 13 bp, Artificial Sequence
  synthetic sequence
gagtcccgctgct

SEQ ID NO: 6274 - DNA, 13 bp, Artificial Sequence
  synthetic sequence
gggaagatgggct

SEQ ID NO: 6275 - DNA, 13 bp, Artificial Sequence
  synthetic sequence
atgagagtggtga

SEQ ID NO: 6276 - DNA, 13 bp, Artificial Sequence
  synthetic sequence
gttggagtgggag

SEQ ID NO: 6277 - DNA, 13 bp, Artificial Sequence
  synthetic sequence
ccaacacaaggtg

SEQ ID NO: 6278 - DNA, 13 bp, Artificial Sequence
  synthetic sequence
ccatgcctgtcac

SEQ ID NO: 6279 - DNA, 13 bp, Artificial Sequence
  synthetic sequence
ctcacaaggagtg

SEQ ID NO: 6280 - DNA, 13 bp, Artificial Sequence
  synthetic sequence
caaaatcatatgc

SEQ ID NO: 6281 - DNA, 13 bp, Artificial Sequence
  synthetic sequence
agactgcgacagt

SEQ ID NO: 6282 - DNA, 13 bp, Artificial Sequence
  synthetic sequence
ttcttcctgaaat

SEQ ID NO: 6283 - DNA, 13 bp, Artificial Sequence
  synthetic sequence
gcctcctgctgac

SEQ ID NO: 6284 - DNA, 13 bp, Artificial Sequence
  synthetic sequence
tgccagccggact

SEQ ID NO: 6285 - DNA, 13 bp, Artificial Sequence
  synthetic sequence
ttgtggaggatca

SEQ ID NO: 6286 - DNA, 13 bp, Artificial Sequence
  synthetic sequence
gccccggcataca

SEQ ID NO: 6287 - DNA, 13 bp, Artificial Sequence
  synthetic sequence
atctaatgggaag

SEQ ID NO: 6288 - DNA, 13 bp, Artificial Sequence
  synthetic sequence
tcaatgagtgacc

SEQ ID NO: 6289 - DNA, 13 bp, Artificial Sequence
  synthetic sequence
ccatacaccagca

SEQ ID NO: 6290 - DNA, 13 bp, Artificial Sequence
  synthetic sequence
aaaggaagacctt

SEQ ID NO: 6291 - DNA, 13 bp, Artificial Sequence
  synthetic sequence
cagtcacagtgga

SEQ ID NO: 6292 - DNA, 13 bp, Artificial Sequence
  synthetic sequence
cacaatgccccca

SEQ ID NO: 6293 - DNA, 13 bp, Artificial Sequence
  synthetic sequence
aggttcttgaatg

SEQ ID NO: 6294 - DNA, 13 bp, Artificial Sequence
  synthetic sequence
atcatacccaagt

SEQ ID NO: 6295 - DNA, 13 bp, Artificial Sequence
  synthetic sequence
aaggggagctcaa

SEQ ID NO: 6296 - DNA, 13 bp, Artificial Sequence
  synthetic sequence
tgggctctagtgg

SEQ ID NO: 6297 - DNA, 13 bp, Artificial Sequence
  synthetic sequence
tcatagcagtagc

SEQ ID NO: 6298 - DNA, 13 bp, Artificial Sequence
  synthetic sequence
cagttatggacat

SEQ ID NO: 6299 - DNA, 13 bp, Artificial Sequence
  synthetic sequence
gacatgaaactga

SEQ ID NO: 6300 - DNA, 13 bp, Artificial Sequence
  synthetic sequence
cagatgtcggccc

SEQ ID NO: 6301 - DNA, 13 bp, Artificial Sequence
  synthetic sequence
gaatagccatgac

SEQ ID NO: 6302 - DNA, 13 bp, Artificial Sequence
  synthetic sequence
gaggagcggcttt

SEQ ID NO: 6303 - DNA, 13 bp, Artificial Sequence
  synthetic sequence
gttccaagcgtga

SEQ ID NO: 6304 - DNA, 13 bp, Artificial Sequence
  synthetic sequence
aaaggatggggac

SEQ ID NO: 6305 - DNA, 13 bp, Artificial Sequence
  synthetic sequence
ccatccgcaaagt

SEQ ID NO: 6306 - DNA, 13 bp, Artificial Sequence
  synthetic sequence
gcccacttcacag

SEQ ID NO: 6307 - DNA, 13 bp, Artificial Sequence
  synthetic sequence
gagttcaaggacg

SEQ ID NO: 6308 - DNA, 13 bp, Artificial Sequence
  synthetic sequence
gctgcgctgaagc

SEQ ID NO: 6309 - DNA, 13 bp, Artificial Sequence
  synthetic sequence
tgcttggccttag

SEQ ID NO: 6310 - DNA, 13 bp, Artificial Sequence
  synthetic sequence
gactcggatatgt

SEQ ID NO: 6311 - DNA, 13 bp, Artificial Sequence
  synthetic sequence
tgggaaaaaggga

SEQ ID NO: 6312 - DNA, 13 bp, Artificial Sequence
  synthetic sequence
tgggaaaccaagc

SEQ ID NO: 6313 - DNA, 13 bp, Artificial Sequence
  synthetic sequence
atcaacaggtttt

SEQ ID NO: 6314 - DNA, 13 bp, Artificial Sequence
  synthetic sequence
agctgtggcaagc

SEQ ID NO: 6315 - DNA, 13 bp, Artificial Sequence
  synthetic sequence
agtgatgatcttc

SEQ ID NO: 6316 - DNA, 13 bp, Artificial Sequence
  synthetic sequence
caggaatagctat

SEQ ID NO: 6317 - DNA, 13 bp, Artificial Sequence
  synthetic sequence
ttctagaagaaat

SEQ ID NO: 6318 - DNA, 13 bp, Artificial Sequence
  synthetic sequence
ccacgccaagagg

SEQ ID NO: 6319 - DNA, 13 bp, Artificial Sequence
  synthetic sequence
tgggccctagtgg

SEQ ID NO: 6320 - DNA, 13 bp, Artificial Sequence
  synthetic sequence
ttccaagtgtgag

SEQ ID NO: 6321 - DNA, 13 bp, Artificial Sequence
  synthetic sequence
ggatacacaaagg

SEQ ID NO: 6322 - DNA, 13 bp, Artificial Sequence
  synthetic sequence
gacggctgctggt

SEQ ID NO: 6323 - DNA, 13 bp, Artificial Sequence
  synthetic sequence
ctgggaaaagagg

SEQ ID NO: 6324 - DNA, 13 bp, Artificial Sequence
  synthetic sequence
ttcaagacaaagg

SEQ ID NO: 6325 - DNA, 13 bp, Artificial Sequence
  synthetic sequence
tggacatcatctc

SEQ ID NO: 6326 - DNA, 13 bp, Artificial Sequence
  synthetic sequence
atcctagaggaga

SEQ ID NO: 6327 - DNA, 13 bp, Artificial Sequence
  synthetic sequence
tacatcatggatg

SEQ ID NO: 6328 - DNA, 13 bp, Artificial Sequence
  synthetic sequence
ggagagaagtgga

SEQ ID NO: 6329 - DNA, 13 bp, Artificial Sequence
  synthetic sequence
aaagtcgaggtta

SEQ ID NO: 6330 - DNA, 13 bp, Artificial Sequence
  synthetic sequence
gtcatgaaaaacc

SEQ ID NO: 6331 - DNA, 13 bp, Artificial Sequence
  synthetic sequence
tggatatatccta

SEQ ID NO: 6332 - DNA, 13 bp, Artificial Sequence
  synthetic sequence
gtgatctgatcat

SEQ ID NO: 6333 - DNA, 13 bp, Artificial Sequence
  synthetic sequence
ggggacattggag

SEQ ID NO: 6334 - DNA, 13 bp, Artificial Sequence
  synthetic sequence
cttatggtgtgga

SEQ ID NO: 6335 - DNA, 13 bp, Artificial Sequence
  synthetic sequence
ttacagtggaggt

SEQ ID NO: 6336 - DNA, 13 bp, Artificial Sequence
  synthetic sequence
tgatgggtgccac

SEQ ID NO: 6337 - DNA, 13 bp, Artificial Sequence
  synthetic sequence
gggccatggaccc

SEQ ID NO: 6338 - DNA, 13 bp, Artificial Sequence
  synthetic sequence
aggactgggactg

SEQ ID NO: 6339 - DNA, 13 bp, Artificial Sequence
  synthetic sequence
ctccagcgccata

SEQ ID NO: 6340 - DNA, 13 bp, Artificial Sequence
  synthetic sequence
aactcttggggcc

SEQ ID NO: 6341 - DNA, 13 bp, Artificial Sequence
  synthetic sequence
agctggcccccta

SEQ ID NO: 6342 - DNA, 13 bp, Artificial Sequence
  synthetic sequence
ctacagccatggc

SEQ ID NO: 6343 - DNA, 13 bp, Artificial Sequence
  synthetic sequence
gagtccccaacta

SEQ ID NO: 6344 - DNA, 13 bp, Artificial Sequence
  synthetic sequence
cggcaatgagatc

SEQ ID NO: 6345 - DNA, 13 bp, Artificial Sequence
  synthetic sequence
aaaagaggagatc

SEQ ID NO: 6346 - DNA, 13 bp, Artificial Sequence
  synthetic sequence
gagcaaaggaaaa

SEQ ID NO: 6347 - DNA, 13 bp, Artificial Sequence
  synthetic sequence
gtggtgtggatct

SEQ ID NO: 6348 - DNA, 13 bp, Artificial Sequence
  synthetic sequence
tccgggctaaaga

SEQ ID NO: 6349 - DNA, 13 bp, Artificial Sequence
  synthetic sequence
ctgctgggttcaa

SEQ ID NO: 6350 - DNA, 13 bp, Artificial Sequence
  synthetic sequence
caattaacacccc

SEQ ID NO: 6351 - DNA, 13 bp, Artificial Sequence
  synthetic sequence
ctgctgggtcatg

SEQ ID NO: 6352 - DNA, 13 bp, Artificial Sequence
  synthetic sequence
tctccagtgctgt

SEQ ID NO: 6353 - DNA, 13 bp, Artificial Sequence
  synthetic sequence
atacttggtcatg

SEQ ID NO: 6354 - DNA, 13 bp, Artificial Sequence
  synthetic sequence
tttccacagaagg

SEQ ID NO: 6355 - DNA, 13 bp, Artificial Sequence
  synthetic sequence
atgccctcaggtt

SEQ ID NO: 6356 - DNA, 13 bp, Artificial Sequence
  synthetic sequence
ctgtgcccataca

SEQ ID NO: 6357 - DNA, 13 bp, Artificial Sequence
  synthetic sequence
cggaggatccgga

SEQ ID NO: 6358 - DNA, 13 bp, Artificial Sequence
  synthetic sequence
ttgagattcacgg

SEQ ID NO: 6359 - DNA, 13 bp, Artificial Sequence
  synthetic sequence
tcctctaaccact

SEQ ID NO: 6360 - DNA, 13 bp, Artificial Sequence
  synthetic sequence
atggcatcccttt

SEQ ID NO: 6361 - DNA, 13 bp, Artificial Sequence
  synthetic sequence
ttcactggcctcc

SEQ ID NO: 6362 - DNA, 13 bp, Artificial Sequence
  synthetic sequence
tggcatggcacat

SEQ ID NO: 6363 - DNA, 13 bp, Artificial Sequence
  synthetic sequence
ctctgccacatcc

SEQ ID NO: 6364 - DNA, 13 bp, Artificial Sequence
  synthetic sequence
cttcaaatattgc

SEQ ID NO: 6365 - DNA, 13 bp, Artificial Sequence
  synthetic sequence
gatccattctttg

SEQ ID NO: 6366 - DNA, 13 bp, Artificial Sequence
  synthetic sequence
gccattgatgtgc

SEQ ID NO: 6367 - DNA, 13 bp, Artificial Sequence
  synthetic sequence
accactttgtttt

SEQ ID NO: 6368 - DNA, 13 bp, Artificial Sequence
  synthetic sequence
agcaccattcctc

SEQ ID NO: 6369 - DNA, 13 bp, Artificial Sequence
  synthetic sequence
gttagctgcttct

SEQ ID NO: 6370 - DNA, 13 bp, Artificial Sequence
  synthetic sequence
ctccagtcaccac

SEQ ID NO: 6371 - DNA, 13 bp, Artificial Sequence
  synthetic sequence
ggatgctccatcc

SEQ ID NO: 6372 - DNA, 13 bp, Artificial Sequence
  synthetic sequence
ttgtcattgtgtc

SEQ ID NO: 6373 - DNA, 13 bp, Artificial Sequence
  synthetic sequence
atgttttccattc

SEQ ID NO: 6374 - DNA, 13 bp, Artificial Sequence
  synthetic sequence
tcctagcattgat

SEQ ID NO: 6375 - DNA, 13 bp, Artificial Sequence
  synthetic sequence
atgttttcatctc

SEQ ID NO: 6376 - DNA, 13 bp, Artificial Sequence
  synthetic sequence
atgtctgtccatt

SEQ ID NO: 6377 - DNA, 13 bp, Artificial Sequence
  synthetic sequence
actcctatgacaa

SEQ ID NO: 6378 - DNA, 13 bp, Artificial Sequence
  synthetic sequence
tccaggctctctc

SEQ ID NO: 6379 - DNA, 13 bp, Artificial Sequence
  synthetic sequence
tttcccatgtgat

SEQ ID NO: 6380 - DNA, 13 bp, Artificial Sequence
  synthetic sequence
actctccctcaat

SEQ ID NO: 6381 - DNA, 13 bp, Artificial Sequence
  synthetic sequence
actttttggctcg

SEQ ID NO: 6382 - DNA, 13 bp, Artificial Sequence
  synthetic sequence
tacactccatctg

SEQ ID NO: 6383 - DNA, 13 bp, Artificial Sequence
  synthetic sequence
ttcagtgtgtcac

SEQ ID NO: 6384 - DNA, 13 bp, Artificial Sequence
  synthetic sequence
tttaggcatctcc

SEQ ID NO: 6385 - DNA, 13 bp, Artificial Sequence
  synthetic sequence
taggatcttacct

SEQ ID NO: 6386 - DNA, 13 bp, Artificial Sequence
  synthetic sequence
ccagtgtggagtt

SEQ ID NO: 6387 - DNA, 13 bp, Artificial Sequence
  synthetic sequence
ttcaagaatccaa

SEQ ID NO: 6388 - DNA, 13 bp, Artificial Sequence
  synthetic sequence
gctgggagccatg

SEQ ID NO: 6389 - DNA, 13 bp, Artificial Sequence
  synthetic sequence
atgtgaacgctgc

SEQ ID NO: 6390 - DNA, 13 bp, Artificial Sequence
  synthetic sequence
catctggttccac

SEQ ID NO: 6391 - DNA, 13 bp, Artificial Sequence
  synthetic sequence
ccattcgtttgag

SEQ ID NO: 6392 - DNA, 13 bp, Artificial Sequence
  synthetic sequence
gcaggcctgacaa

SEQ ID NO: 6393 - DNA, 13 bp, Artificial Sequence
  synthetic sequence
gacttcagggccg

SEQ ID NO: 6394 - DNA, 13 bp, Artificial Sequence
  synthetic sequence
ctctctccggggg

SEQ ID NO: 6395 - DNA, 13 bp, Artificial Sequence
  synthetic sequence
agatcgcagtttg

SEQ ID NO: 6396 - DNA, 13 bp, Artificial Sequence
  synthetic sequence
ccacgtctcttga

SEQ ID NO: 6397 - DNA, 13 bp, Artificial Sequence
  synthetic sequence
actgttcccagca

SEQ ID NO: 6398 - DNA, 13 bp, Artificial Sequence
  synthetic sequence
cccagggccatga

SEQ ID NO: 6399 - DNA, 13 bp, Artificial Sequence
  synthetic sequence
catccgagttcat

SEQ ID NO: 6400 - DNA, 13 bp, Artificial Sequence
  synthetic sequence
cccccaccatgga

SEQ ID NO: 6401 - DNA, 13 bp, Artificial Sequence
  synthetic sequence
cggcgatctgtgc

SEQ ID NO: 6402 - DNA, 13 bp, Artificial Sequence
  synthetic sequence
tcacccaagtagc

SEQ ID NO: 6403 - DNA, 13 bp, Artificial Sequence
  synthetic sequence
agagcactctgag

SEQ ID NO: 6404 - DNA, 13 bp, Artificial Sequence
  synthetic sequence
gtctcttaaccag

SEQ ID NO: 6405 - DNA, 13 bp, Artificial Sequence
  synthetic sequence
ctggtctttccca

SEQ ID NO: 6406 - DNA, 13 bp, Artificial Sequence
  synthetic sequence
ccaaggccatgac

SEQ ID NO: 6407 - DNA, 13 bp, Artificial Sequence
  synthetic sequence
ttgcagttatcaa

SEQ ID NO: 6408 - DNA, 13 bp, Artificial Sequence
  synthetic sequence
aatcgacgtcatc

SEQ ID NO: 6409 - DNA, 13 bp, Artificial Sequence
  synthetic sequence
acgaggaccatca

SEQ ID NO: 6410 - DNA, 13 bp, Artificial Sequence
  synthetic sequence
ccatccacctcgg

SEQ ID NO: 6411 - DNA, 13 bp, Artificial Sequence
  synthetic sequence
tggtgaatgtgaa

SEQ ID NO: 6412 - DNA, 13 bp, Artificial Sequence
  synthetic sequence
ccgcatcaagaca

SEQ ID NO: 6413 - DNA, 13 bp, Artificial Sequence
  synthetic sequence
tggccctctctcc

SEQ ID NO: 6414 - DNA, 13 bp, Artificial Sequence
  synthetic sequence
acgaaaaagattc

SEQ ID NO: 6415 - DNA, 13 bp, Artificial Sequence
  synthetic sequence
aagggtggggaag

SEQ ID NO: 6416 - DNA, 13 bp, Artificial Sequence
  synthetic sequence
ctgatagcattat

SEQ ID NO: 6417 - DNA, 13 bp, Artificial Sequence
  synthetic sequence
gccatccgtttga

SEQ ID NO: 6418 - DNA, 13 bp, Artificial Sequence
  synthetic sequence
tccccatccagtg

SEQ ID NO: 6419 - DNA, 13 bp, Artificial Sequence
  synthetic sequence
gtgtctgccccag

SEQ ID NO: 6420 - DNA, 13 bp, Artificial Sequence
  synthetic sequence
tcttgtcctccat

SEQ ID NO: 6421 - DNA, 13 bp, Artificial Sequence
  synthetic sequence
gatattgatgcct

SEQ ID NO: 6422 - DNA, 13 bp, Artificial Sequence
  synthetic sequence
cccttcttcgccc

SEQ ID NO: 6423 - DNA, 13 bp, Artificial Sequence
  synthetic sequence
ccatctgtggtct

SEQ ID NO: 6424 - DNA, 13 bp, Artificial Sequence
  synthetic sequence
cagggctttgaca

SEQ ID NO: 6425 - DNA, 13 bp, Artificial Sequence
  synthetic sequence
gcatccatccatc

SEQ ID NO: 6426 - DNA, 13 bp, Artificial Sequence
  synthetic sequence
ttccagtgacttc

SEQ ID NO: 6427 - DNA, 13 bp, Artificial Sequence
  synthetic sequence
agaggagatcccg

SEQ ID NO: 6428 - DNA, 13 bp, Artificial Sequence
  synthetic sequence
tcccccaccatag

SEQ ID NO: 6429 - DNA, 13 bp, Artificial Sequence
  synthetic sequence
ttggccactcaca

SEQ ID NO: 6430 - DNA, 13 bp, Artificial Sequence
  synthetic sequence
ttcccatccagtg

SEQ ID NO: 6431 - DNA, 13 bp, Artificial Sequence
  synthetic sequence
tttgactcagtgt

SEQ ID NO: 6432 - DNA, 13 bp, Artificial Sequence
  synthetic sequence
cacaggctgcaca

SEQ ID NO: 6433 - DNA, 13 bp, Artificial Sequence
  synthetic sequence
acactggaactga

SEQ ID NO: 6434 - DNA, 13 bp, Artificial Sequence
  synthetic sequence
ctacacacgtgct

SEQ ID NO: 6435 - DNA, 13 bp, Artificial Sequence
  synthetic sequence
agtgaggaaggcc

SEQ ID NO: 6436 - DNA, 13 bp, Artificial Sequence
  synthetic sequence
cagggcttaaccc

SEQ ID NO: 6437 - DNA, 13 bp, Artificial Sequence
  synthetic sequence
acaccagtggcga

SEQ ID NO: 6438 - DNA, 13 bp, Artificial Sequence
  synthetic sequence
cacaggtgctgca

SEQ ID NO: 6439 - DNA, 13 bp, Artificial Sequence
  synthetic sequence
cgcggtaatacgg

SEQ ID NO: 6440 - DNA, 13 bp, Artificial Sequence
  synthetic sequence
aggaattgacggg

SEQ ID NO: 6441 - DNA, 13 bp, Artificial Sequence
  synthetic sequence
acgatgagtgctg

SEQ ID NO: 6442 - DNA, 13 bp, Artificial Sequence
  synthetic sequence
ttagttgccagcg

SEQ ID NO: 6443 - DNA, 13 bp, Artificial Sequence
  synthetic sequence
ccgggcactttaa

SEQ ID NO: 6444 - DNA, 13 bp, Artificial Sequence
  synthetic sequence
ttacctccgtgtt

SEQ ID NO: 6445 - DNA, 13 bp, Artificial Sequence
  synthetic sequence
aggaattgatggg

SEQ ID NO: 6446 - DNA, 13 bp, Artificial Sequence
  synthetic sequence
ccgtggcatgctg

SEQ ID NO: 6447 - DNA, 13 bp, Artificial Sequence
  synthetic sequence
cgggacttaaccc

SEQ ID NO: 6448 - DNA, 13 bp, Artificial Sequence
  synthetic sequence
ttgcgaccgtagt

SEQ ID NO: 6449 - DNA, 13 bp, Artificial Sequence
  synthetic sequence
atttcacctctac

SEQ ID NO: 6450 - DNA, 13 bp, Artificial Sequence
  synthetic sequence
cctacatgccctt

SEQ ID NO: 6451 - DNA, 13 bp, Artificial Sequence
  synthetic sequence
cccacgctttcgc

SEQ ID NO: 6452 - DNA, 13 bp, Artificial Sequence
  synthetic sequence
gtttgccgggact

SEQ ID NO: 6453 - DNA, 13 bp, Artificial Sequence
  synthetic sequence
gacttgacatcat

SEQ ID NO: 6454 - DNA, 13 bp, Artificial Sequence
  synthetic sequence
attagctcagcct

SEQ ID NO: 6455 - DNA, 13 bp, Artificial Sequence
  synthetic sequence
tcgcgttgcatcg

SEQ ID NO: 6456 - DNA, 13 bp, Artificial Sequence
  synthetic sequence
actgagatgactt

SEQ ID NO: 6457 - DNA, 13 bp, Artificial Sequence
  synthetic sequence
aaggtttttcgcg

SEQ ID NO: 6458 - DNA, 13 bp, Artificial Sequence
  synthetic sequence
tatcactggcagt

SEQ ID NO: 6459 - DNA, 13 bp, Artificial Sequence
  synthetic sequence
acggaataacaca

SEQ ID NO: 6460 - DNA, 13 bp, Artificial Sequence
  synthetic sequence
gtcgcaagattaa

SEQ ID NO: 6461 - DNA, 13 bp, Artificial Sequence
  synthetic sequence
ttgggttaagtcc

SEQ ID NO: 6462 - DNA, 13 bp, Artificial Sequence
  synthetic sequence
cgtcaagtcctca

SEQ ID NO: 6463 - DNA, 13 bp, Artificial Sequence
  synthetic sequence
caaaagccatctc

SEQ ID NO: 6464 - DNA, 13 bp, Artificial Sequence
  synthetic sequence
gggaggcagcagt

SEQ ID NO: 6465 - DNA, 13 bp, Artificial Sequence
  synthetic sequence
cgagtgtagaggt

SEQ ID NO: 6466 - DNA, 13 bp, Artificial Sequence
  synthetic sequence
ataccctggtagt

SEQ ID NO: 6467 - DNA, 13 bp, Artificial Sequence
  synthetic sequence
ccttgacatcccg

SEQ ID NO: 6468 - DNA, 13 bp, Artificial Sequence
  synthetic sequence
gtaggcggatatt

SEQ ID NO: 6469 - DNA, 13 bp, Artificial Sequence
  synthetic sequence
gttggattagcta

SEQ ID NO: 6470 - DNA, 13 bp, Artificial Sequence
  synthetic sequence
ggagaagaagccc

SEQ ID NO: 6471 - DNA, 13 bp, Artificial Sequence
  synthetic sequence
acgattactagcg

SEQ ID NO: 6472 - DNA, 13 bp, Artificial Sequence
  synthetic sequence
agtcccagtgtgg

SEQ ID NO: 6473 - DNA, 13 bp, Artificial Sequence
  synthetic sequence
ccaccgcttgtgc

SEQ ID NO: 6474 - DNA, 13 bp, Artificial Sequence
  synthetic sequence
gcaactaagggcg

SEQ ID NO: 6475 - DNA, 13 bp, Artificial Sequence
  synthetic sequence
ctttacaacccta

SEQ ID NO: 6476 - DNA, 13 bp, Artificial Sequence
  synthetic sequence
gagccgccttcgc

SEQ ID NO: 6477 - DNA, 13 bp, Artificial Sequence
  synthetic sequence
ctaacattcatcg

SEQ ID NO: 6478 - DNA, 13 bp, Artificial Sequence
  synthetic sequence
caaaggcagttcc

SEQ ID NO: 6479 - DNA, 13 bp, Artificial Sequence
  synthetic sequence
ccccttcgtatta

SEQ ID NO: 6480 - DNA, 13 bp, Artificial Sequence
  synthetic sequence
agcccagcccgta

SEQ ID NO: 6481 - DNA, 13 bp, Artificial Sequence
  synthetic sequence
tgcagcacctgtc

SEQ ID NO: 6482 - DNA, 13 bp, Artificial Sequence
  synthetic sequence
gtgcgtcttaagc

SEQ ID NO: 6483 - DNA, 13 bp, Artificial Sequence
  synthetic sequence
ttcttttataaat

SEQ ID NO: 6484 - DNA, 13 bp, Artificial Sequence
  synthetic sequence
gaggcagcagcta

SEQ ID NO: 6485 - DNA, 13 bp, Artificial Sequence
  synthetic sequence
acgctgagtcacg

SEQ ID NO: 6486 - DNA, 13 bp, Artificial Sequence
  synthetic sequence
tacaggtgctgca

SEQ ID NO: 6487 - DNA, 13 bp, Artificial Sequence
  synthetic sequence
gggtaaatgccta

SEQ ID NO: 6488 - DNA, 13 bp, Artificial Sequence
  synthetic sequence
actcagataagac

SEQ ID NO: 6489 - DNA, 13 bp, Artificial Sequence
  synthetic sequence
gttagtaccgaag

SEQ ID NO: 6490 - DNA, 13 bp, Artificial Sequence
  synthetic sequence
tgttggaaactat

SEQ ID NO: 6491 - DNA, 13 bp, Artificial Sequence
  synthetic sequence
tacaatggcctgt

SEQ ID NO: 6492 - DNA, 13 bp, Artificial Sequence
  synthetic sequence
ggagcatgtggtt

SEQ ID NO: 6493 - DNA, 13 bp, Artificial Sequence
  synthetic sequence
gcgtaaagggtga

SEQ ID NO: 6494 - DNA, 13 bp, Artificial Sequence
  synthetic sequence
agatggggataac

SEQ ID NO: 6495 - DNA, 13 bp, Artificial Sequence
  synthetic sequence
cattctgatatac

SEQ ID NO: 6496 - DNA, 13 bp, Artificial Sequence
  synthetic sequence
gggtatctaatcc

SEQ ID NO: 6497 - DNA, 13 bp, Artificial Sequence
  synthetic sequence
gactgagacctgc

SEQ ID NO: 6498 - DNA, 13 bp, Artificial Sequence
  synthetic sequence
tatgtcaagccct

SEQ ID NO: 6499 - DNA, 13 bp, Artificial Sequence
  synthetic sequence
cttcctttcatca

SEQ ID NO: 6500 - DNA, 13 bp, Artificial Sequence
  synthetic sequence
acaatctttcgac

SEQ ID NO: 6501 - DNA, 13 bp, Artificial Sequence
  synthetic sequence
gggacttaaccca

SEQ ID NO: 6502 - DNA, 13 bp, Artificial Sequence
  synthetic sequence
gcccaggacataa

SEQ ID NO: 6503 - DNA, 13 bp, Artificial Sequence
  synthetic sequence
ttgcgagcatact

SEQ ID NO: 6504 - DNA, 13 bp, Artificial Sequence
  synthetic sequence
tcgcctccggtat

SEQ ID NO: 6505 - DNA, 13 bp, Artificial Sequence
  synthetic sequence
ccagtgtgaccgt

SEQ ID NO: 6506 - DNA, 13 bp, Artificial Sequence
  synthetic sequence
cataaattaacgt

SEQ ID NO: 6507 - DNA, 13 bp, Artificial Sequence
  synthetic sequence
gacttatatatcc

SEQ ID NO: 6508 - DNA, 13 bp, Artificial Sequence
  synthetic sequence
attttatgcatag

SEQ ID NO: 6509 - DNA, 13 bp, Artificial Sequence
  synthetic sequence
gtggctttgtgct

SEQ ID NO: 6510 - DNA, 13 bp, Artificial Sequence
  synthetic sequence
atttaacaggtat

SEQ ID NO: 6511 - DNA, 13 bp, Artificial Sequence
  synthetic sequence
agttcaaggcagt

SEQ ID NO: 6512 - DNA, 13 bp, Artificial Sequence
  synthetic sequence
taattttaataat

SEQ ID NO: 6513 - DNA, 13 bp, Artificial Sequence
  synthetic sequence
tttgaggaggctg

SEQ ID NO: 6514 - DNA, 13 bp, Artificial Sequence
  synthetic sequence
aaatcaacttttt

SEQ ID NO: 6515 - DNA, 13 bp, Artificial Sequence
  synthetic sequence
ttaaagatccctc

SEQ ID NO: 6516 - DNA, 13 bp, Artificial Sequence
  synthetic sequence
aatttaaagttgg

SEQ ID NO: 6517 - DNA, 13 bp, Artificial Sequence
  synthetic sequence
tgcattattttct

SEQ ID NO: 6518 - DNA, 13 bp, Artificial Sequence
  synthetic sequence
aggctttaattac

SEQ ID NO: 6519 - DNA, 13 bp, Artificial Sequence
  synthetic sequence
gggcaaatagact

SEQ ID NO: 6520 - DNA, 13 bp, Artificial Sequence
  synthetic sequence
aggtataggtaat

SEQ ID NO: 6521 - DNA, 13 bp, Artificial Sequence
  synthetic sequence
gctgctaagaagg

SEQ ID NO: 6522 - DNA, 13 bp, Artificial Sequence
  synthetic sequence
tacaagtgtttaa

SEQ ID NO: 6523 - DNA, 13 bp, Artificial Sequence
  synthetic sequence
tacctatttcatt

SEQ ID NO: 6524 - DNA, 13 bp, Artificial Sequence
  synthetic sequence
tcctgatatcaaa

SEQ ID NO: 6525 - DNA, 13 bp, Artificial Sequence
  synthetic sequence
ttaatttaatttg

SEQ ID NO: 6526 - DNA, 13 bp, Artificial Sequence
  synthetic sequence
tcctgaagatatt

SEQ ID NO: 6527 - DNA, 13 bp, Artificial Sequence
  synthetic sequence
gctcaatttctac

SEQ ID NO: 6528 - DNA, 13 bp, Artificial Sequence
  synthetic sequence
atttgaaagcatt

SEQ ID NO: 6529 - DNA, 13 bp, Artificial Sequence
  synthetic sequence
cttttggtcccgc

SEQ ID NO: 6530 - DNA, 13 bp, Artificial Sequence
  synthetic sequence
tcccgtaaaaatt

SEQ ID NO: 6531 - DNA, 13 bp, Artificial Sequence
  synthetic sequence
atcttttaaagag

SEQ ID NO: 6532 - DNA, 13 bp, Artificial Sequence
  synthetic sequence
tatctcttaaatt

SEQ ID NO: 6533 - DNA, 13 bp, Artificial Sequence
  synthetic sequence
gacacacctccaa

SEQ ID NO: 6534 - DNA, 13 bp, Artificial Sequence
  synthetic sequence
accatttgctacg

SEQ ID NO: 6535 - DNA, 13 bp, Artificial Sequence
  synthetic sequence
tcgtgtcgtgaga

SEQ ID NO: 6536 - DNA, 13 bp, Artificial Sequence
  synthetic sequence
gttgttcggattt

SEQ ID NO: 6537 - DNA, 13 bp, Artificial Sequence
  synthetic sequence
tggcgcagctaac

SEQ ID NO: 6538 - DNA, 13 bp, Artificial Sequence
  synthetic sequence
agcccttgacatc

SEQ ID NO: 6539 - DNA, 13 bp, Artificial Sequence
  synthetic sequence
tctccaaaagcca

SEQ ID NO: 6540 - DNA, 13 bp, Artificial Sequence
  synthetic sequence
tatggaagaggtg

SEQ ID NO: 6541 - DNA, 13 bp, Artificial Sequence
  synthetic sequence
acggcccagactc

SEQ ID NO: 6542 - DNA, 13 bp, Artificial Sequence
  synthetic sequence
gtgataagccgag

SEQ ID NO: 6543 - DNA, 13 bp, Artificial Sequence
  synthetic sequence
gataatgacggta

SEQ ID NO: 6544 - DNA, 13 bp, Artificial Sequence
  synthetic sequence
ccgcgttggatta

SEQ ID NO: 6545 - DNA, 13 bp, Artificial Sequence
  synthetic sequence
gcgaaagcgtggg

SEQ ID NO: 6546 - DNA, 13 bp, Artificial Sequence
  synthetic sequence
gcgattccaactt

SEQ ID NO: 6547 - DNA, 13 bp, Artificial Sequence
  synthetic sequence
ttgagccccggga

SEQ ID NO: 6548 - DNA, 13 bp, Artificial Sequence
  synthetic sequence
cttcgccactggt

SEQ ID NO: 6549 - DNA, 13 bp, Artificial Sequence
  synthetic sequence
gctccaccgcttg

SEQ ID NO: 6550 - DNA, 13 bp, Artificial Sequence
  synthetic sequence
ggcacgaagttag

SEQ ID NO: 6551 - DNA, 13 bp, Artificial Sequence
  synthetic sequence
cggcgtggactac

SEQ ID NO: 6552 - DNA, 13 bp, Artificial Sequence
  synthetic sequence
tgtggctgatcat

SEQ ID NO: 6553 - DNA, 13 bp, Artificial Sequence
  synthetic sequence
actaaccgcgatc

SEQ ID NO: 6554 - DNA, 13 bp, Artificial Sequence
  synthetic sequence
atcactcacgcgg

SEQ ID NO: 6555 - DNA, 13 bp, Artificial Sequence
  synthetic sequence
agcccagcccgta

SEQ ID NO: 6556 - DNA, 13 bp, Artificial Sequence
  synthetic sequence
ccaactgaatgct

SEQ ID NO: 6557 - DNA, 13 bp, Artificial Sequence
  synthetic sequence
ggcggaagggtta

SEQ ID NO: 6558 - DNA, 13 bp, Artificial Sequence
  synthetic sequence
ctaataccgaatg

SEQ ID NO: 6559 - DNA, 13 bp, Artificial Sequence
  synthetic sequence
tcttcggaccttt

SEQ ID NO: 6560 - DNA, 13 bp, Artificial Sequence
  synthetic sequence
gccattactagca

SEQ ID NO: 6561 - DNA, 13 bp, Artificial Sequence
  synthetic sequence
ttaaaccacatgc

SEQ ID NO: 6562 - DNA, 13 bp, Artificial Sequence
  synthetic sequence
ctttccgcctaca

SEQ ID NO: 6563 - DNA, 13 bp, Artificial Sequence
  synthetic sequence
taagggttgcgct

SEQ ID NO: 6564 - DNA, 13 bp, Artificial Sequence
  synthetic sequence
acagccatgcagc

SEQ ID NO: 6565 - DNA, 13 bp, Artificial Sequence
  synthetic sequence
ctcctcaggcggc

SEQ ID NO: 6566 - DNA, 13 bp, Artificial Sequence
  synthetic sequence
taacgctagcacc

SEQ ID NO: 6567 - DNA, 13 bp, Artificial Sequence
  synthetic sequence
gtcagactttcgt

SEQ ID NO: 6568 - DNA, 13 bp, Artificial Sequence
  synthetic sequence
acgcatttcaccg

SEQ ID NO: 6569 - DNA, 13 bp, Artificial Sequence
  synthetic sequence
aaaagcgccttcg

SEQ ID NO: 6570 - DNA, 13 bp, Artificial Sequence
  synthetic sequence
tgcttctttacct

SEQ ID NO: 6571 - DNA, 13 bp, Artificial Sequence
  synthetic sequence
gattctcgactgc

SEQ ID NO: 6572 - DNA, 13 bp, Artificial Sequence
  synthetic sequence
ttgcagactacaa

SEQ ID NO: 6573 - DNA, 13 bp, Artificial Sequence
  synthetic sequence
taagggccatgct

SEQ ID NO: 6574 - DNA, 13 bp, Artificial Sequence
  synthetic sequence
cacatcaagtatg

SEQ ID NO: 6575 - DNA, 13 bp, Artificial Sequence
  synthetic sequence
gctaccttctgta

SEQ ID NO: 6576 - DNA, 13 bp, Artificial Sequence
  synthetic sequence
tctctcaatccgc

SEQ ID NO: 6577 - DNA, 13 bp, Artificial Sequence
  synthetic sequence
tctaatcctgttt

SEQ ID NO: 6578 - DNA, 13 bp, Artificial Sequence
  synthetic sequence
taccccaccaaca

SEQ ID NO: 6579 - DNA, 13 bp, Artificial Sequence
  synthetic sequence
agtgctttacaac

SEQ ID NO: 6580 - DNA, 13 bp, Artificial Sequence
  synthetic sequence
acccaggcagtct

SEQ ID NO: 6581 - DNA, 13 bp, Artificial Sequence
  synthetic sequence
aatacatgtcaag

SEQ ID NO: 6582 - DNA, 13 bp, Artificial Sequence
  synthetic sequence
gatagtattagat

SEQ ID NO: 6583 - DNA, 13 bp, Artificial Sequence
  synthetic sequence
atcctctagaaag

SEQ ID NO: 6584 - DNA, 13 bp, Artificial Sequence
  synthetic sequence
aggtaaggttctt

SEQ ID NO: 6585 - DNA, 13 bp, Artificial Sequence
  synthetic sequence
gcgagtggcggac

SEQ ID NO: 6586 - DNA, 13 bp, Artificial Sequence
  synthetic sequence
tctgagaggacga

SEQ ID NO: 6587 - DNA, 13 bp, Artificial Sequence
  synthetic sequence
ccctggtagtcca

SEQ ID NO: 6588 - DNA, 13 bp, Artificial Sequence
  synthetic sequence
tgtgaaagccctg

SEQ ID NO: 6589 - DNA, 13 bp, Artificial Sequence
  synthetic sequence
cttacgggtaggg

SEQ ID NO: 6590 - DNA, 13 bp, Artificial Sequence
  synthetic sequence
gaaagaacaccag

SEQ ID NO: 6591 - DNA, 13 bp, Artificial Sequence
  synthetic sequence
ctgtgccagcagc

SEQ ID NO: 6592 - DNA, 13 bp, Artificial Sequence
  synthetic sequence
tgacatcctcgga

SEQ ID NO: 6593 - DNA, 13 bp, Artificial Sequence
  synthetic sequence
aggccttcgggtt

SEQ ID NO: 6594 - DNA, 13 bp, Artificial Sequence
  synthetic sequence
caaccctcgtcct

SEQ ID NO: 6595 - DNA, 13 bp, Artificial Sequence
  synthetic sequence
taatctctttgga

SEQ ID NO: 6596 - DNA, 13 bp, Artificial Sequence
  synthetic sequence
caaggttaaaact

SEQ ID NO: 6597 - DNA, 13 bp, Artificial Sequence
  synthetic sequence
actagcgattcca

SEQ ID NO: 6598 - DNA, 13 bp, Artificial Sequence
  synthetic sequence
aagatacccagta

SEQ ID NO: 6599 - DNA, 13 bp, Artificial Sequence
  synthetic sequence
cgcccaaggatat

SEQ ID NO: 6600 - DNA, 13 bp, Artificial Sequence
  synthetic sequence
ttttcgcgttgca

SEQ ID NO: 6601 - DNA, 13 bp, Artificial Sequence
  synthetic sequence
cggcttggcaacc

SEQ ID NO: 6602 - DNA, 13 bp, Artificial Sequence
  synthetic sequence
ctaatccgacgta

SEQ ID NO: 6603 - DNA, 13 bp, Artificial Sequence
  synthetic sequence
cgcctcagtgtca

SEQ ID NO: 6604 - DNA, 13 bp, Artificial Sequence
  synthetic sequence
ttatcaccggcag

SEQ ID NO: 6605 - DNA, 13 bp, Artificial Sequence
  synthetic sequence
tcccgtaggagtc

SEQ ID NO: 6606 - DNA, 13 bp, Artificial Sequence
  synthetic sequence
tactaagaagtga

SEQ ID NO: 6607 - DNA, 13 bp, Artificial Sequence
  synthetic sequence
gcttgcactctct

SEQ ID NO: 6608 - DNA, 13 bp, Artificial Sequence
  synthetic sequence
tgacgacagccat

SEQ ID NO: 6609 - DNA, 13 bp, Artificial Sequence
  synthetic sequence
gggtgagtaacgc

SEQ ID NO: 6610 - DNA, 13 bp, Artificial Sequence
  synthetic sequence
gaaggaacaccaa

SEQ ID NO: 6611 - DNA, 13 bp, Artificial Sequence
  synthetic sequence
atgtgaaagccca

SEQ ID NO: 6612 - DNA, 13 bp, Artificial Sequence
  synthetic sequence
gttaagtcccgca

SEQ ID NO: 6613 - DNA, 13 bp, Artificial Sequence
  synthetic sequence
agtactagctgtt

SEQ ID NO: 6614 - DNA, 13 bp, Artificial Sequence
  synthetic sequence
gggctacacacgt

SEQ ID NO: 6615 - DNA, 13 bp, Artificial Sequence
  synthetic sequence
gccagcagccgcg

SEQ ID NO: 6616 - DNA, 13 bp, Artificial Sequence
  synthetic sequence
tgatccagcaatg

SEQ ID NO: 6617 - DNA, 13 bp, Artificial Sequence
  synthetic sequence
ctgatttgagagg

SEQ ID NO: 6618 - DNA, 13 bp, Artificial Sequence
  synthetic sequence
attgacggggacc

SEQ ID NO: 6619 - DNA, 13 bp, Artificial Sequence
  synthetic sequence
tttctagagatag

SEQ ID NO: 6620 - DNA, 13 bp, Artificial Sequence
  synthetic sequence
gcagatggatgag

SEQ ID NO: 6621 - DNA, 13 bp, Artificial Sequence
  synthetic sequence
gtattctgacctg

SEQ ID NO: 6622 - DNA, 13 bp, Artificial Sequence
  synthetic sequence
ctgtaatacccat

SEQ ID NO: 6623 - DNA, 13 bp, Artificial Sequence
  synthetic sequence
ccgccttgtcagc

SEQ ID NO: 6624 - DNA, 13 bp, Artificial Sequence
  synthetic sequence
gatccccacgctt

SEQ ID NO: 6625 - DNA, 13 bp, Artificial Sequence
  synthetic sequence
caccaactagcta

SEQ ID NO: 6626 - DNA, 13 bp, Artificial Sequence
  synthetic sequence
cccactgctgcct

SEQ ID NO: 6627 - DNA, 13 bp, Artificial Sequence
  synthetic sequence
ctccccaactaaa

SEQ ID NO: 6628 - DNA, 13 bp, Artificial Sequence
  synthetic sequence
attaaaccacatg

SEQ ID NO: 6629 - DNA, 13 bp, Artificial Sequence
  synthetic sequence
cagccgtgcagca

SEQ ID NO: 6630 - DNA, 13 bp, Artificial Sequence
  synthetic sequence
gcccagtaattcc

SEQ ID NO: 6631 - DNA, 13 bp, Artificial Sequence
  synthetic sequence
gctgcgccactag

SEQ ID NO: 6632 - DNA, 13 bp, Artificial Sequence
  synthetic sequence
ccatactctagtt

SEQ ID NO: 6633 - DNA, 13 bp, Artificial Sequence
  synthetic sequence
ttcctctaccgta

SEQ ID NO: 6634 - DNA, 13 bp, Artificial Sequence
  synthetic sequence
tacttatcgcgtt

SEQ ID NO: 6635 - DNA, 13 bp, Artificial Sequence
  synthetic sequence
acgggtgagtaac

SEQ ID NO: 6636 - DNA, 13 bp, Artificial Sequence
  synthetic sequence
ctagtgtagaggt

SEQ ID NO: 6637 - DNA, 13 bp, Artificial Sequence
  synthetic sequence
caaacaggattag

SEQ ID NO: 6638 - DNA, 13 bp, Artificial Sequence
  synthetic sequence
ttcggaattactg

SEQ ID NO: 6639 - DNA, 13 bp, Artificial Sequence
  synthetic sequence
ttaagcactccgc

SEQ ID NO: 6640 - DNA, 13 bp, Artificial Sequence
  synthetic sequence
agctcgtgtcgtg

SEQ ID NO: 6641 - DNA, 13 bp, Artificial Sequence
  synthetic sequence
ggtttaattcgat

SEQ ID NO: 6642 - DNA, 13 bp, Artificial Sequence
  synthetic sequence
actataagaaaac

SEQ ID NO: 6643 - DNA, 13 bp, Artificial Sequence
  synthetic sequence
gagacacggccca

SEQ ID NO: 6644 - DNA, 13 bp, Artificial Sequence
  synthetic sequence
cagattaggtagt

SEQ ID NO: 6645 - DNA, 13 bp, Artificial Sequence
  synthetic sequence
gtggagcaaatcc

SEQ ID NO: 6646 - DNA, 13 bp, Artificial Sequence
  synthetic sequence
ggttgtaaagctc

SEQ ID NO: 6647 - DNA, 13 bp, Artificial Sequence
  synthetic sequence
gttgtaaaactct

SEQ ID NO: 6648 - DNA, 13 bp, Artificial Sequence
  synthetic sequence
ctctaaaagacat

SEQ ID NO: 6649 - DNA, 13 bp, Artificial Sequence
  synthetic sequence
gtcgttggtgagg

SEQ ID NO: 6650 - DNA, 13 bp, Artificial Sequence
  synthetic sequence
gcgattccaactt

SEQ ID NO: 6651 - DNA, 13 bp, Artificial Sequence
  synthetic sequence
cccagtgtggctg

SEQ ID NO: 6652 - DNA, 13 bp, Artificial Sequence
  synthetic sequence
gcacggagttagc

SEQ ID NO: 6653 - DNA, 13 bp, Artificial Sequence
  synthetic sequence
cattgtagcacgc

SEQ ID NO: 6654 - DNA, 13 bp, Artificial Sequence
  synthetic sequence
ctggatcaggctt

SEQ ID NO: 6655 - DNA, 13 bp, Artificial Sequence
  synthetic sequence
tggcaaataagaa

SEQ ID NO: 6656 - DNA, 13 bp, Artificial Sequence
  synthetic sequence
tgagttttaatct

SEQ ID NO: 6657 - DNA, 13 bp, Artificial Sequence
  synthetic sequence
cactcatcgttta

SEQ ID NO: 6658 - DNA, 13 bp, Artificial Sequence
  synthetic sequence
tgttcctcctaat

SEQ ID NO: 6659 - DNA, 13 bp, Artificial Sequence
  synthetic sequence
aaagcatctctgc

SEQ ID NO: 6660 - DNA, 13 bp, Artificial Sequence
  synthetic sequence
tttgaaagcaatt

SEQ ID NO: 6661 - DNA, 13 bp, Artificial Sequence
  synthetic sequence
gcgattccggctt

SEQ ID NO: 6662 - DNA, 13 bp, Artificial Sequence
  synthetic sequence
cagttttagaagc

SEQ ID NO: 6663 - DNA, 13 bp, Artificial Sequence
  synthetic sequence
ggtccagccgagc

SEQ ID NO: 6664 - DNA, 13 bp, Artificial Sequence
  synthetic sequence
gtgttcttcctaa

SEQ ID NO: 6665 - DNA, 13 bp, Artificial Sequence
  synthetic sequence
cgggctttcactt

SEQ ID NO: 6666 - DNA, 13 bp, Artificial Sequence
  synthetic sequence
gatggatgccttg

SEQ ID NO: 6667 - DNA, 13 bp, Artificial Sequence
  synthetic sequence
agctggttctccg

SEQ ID NO: 6668 - DNA, 13 bp, Artificial Sequence
  synthetic sequence
cggataaaaggta

SEQ ID NO: 6669 - DNA, 13 bp, Artificial Sequence
  synthetic sequence
ctgaaccttttaa

SEQ ID NO: 6670 - DNA, 13 bp, Artificial Sequence
  synthetic sequence
ccgtaaaactgac

SEQ ID NO: 6671 - DNA, 13 bp, Artificial Sequence
  synthetic sequence
atgcggggtaccc

SEQ ID NO: 6672 - DNA, 13 bp, Artificial Sequence
  synthetic sequence
ctgtaacttaggg

SEQ ID NO: 6673 - DNA, 13 bp, Artificial Sequence
  synthetic sequence
cctgcccggtgct

SEQ ID NO: 6674 - DNA, 13 bp, Artificial Sequence
  synthetic sequence
aatttgagaggat

SEQ ID NO: 6675 - DNA, 13 bp, Artificial Sequence
  synthetic sequence
tagtgacgagcga

SEQ ID NO: 6676 - DNA, 13 bp, Artificial Sequence
  synthetic sequence
atgtcgactcatc

SEQ ID NO: 6677 - DNA, 13 bp, Artificial Sequence
  synthetic sequence
acaagtaccgtga

SEQ ID NO: 6678 - DNA, 13 bp, Artificial Sequence
  synthetic sequence
acattgtatggtg

SEQ ID NO: 6679 - DNA, 13 bp, Artificial Sequence
  synthetic sequence
aaactccgaatac

SEQ ID NO: 6680 - DNA, 13 bp, Artificial Sequence
  synthetic sequence
ttcctgtgttaag

SEQ ID NO: 6681 - DNA, 13 bp, Artificial Sequence
  synthetic sequence
ttcttgcgccgaa

SEQ ID NO: 6682 - DNA, 13 bp, Artificial Sequence
  synthetic sequence
aaaccgacactgg

SEQ ID NO: 6683 - DNA, 13 bp, Artificial Sequence
  synthetic sequence
ccgtctaaggtcc

SEQ ID NO: 6684 - DNA, 13 bp, Artificial Sequence
  synthetic sequence
ggaggaccgaacc

SEQ ID NO: 6685 - DNA, 13 bp, Artificial Sequence
  synthetic sequence
gaatggggaaacc

SEQ ID NO: 6686 - DNA, 13 bp, Artificial Sequence
  synthetic sequence
tcagcttttatag

SEQ ID NO: 6687 - DNA, 13 bp, Artificial Sequence
  synthetic sequence
gtagcggagcgtt

SEQ ID NO: 6688 - DNA, 13 bp, Artificial Sequence
  synthetic sequence
agcttaagccgtt

SEQ ID NO: 6689 - DNA, 13 bp, Artificial Sequence
  synthetic sequence
agatccttgagta

SEQ ID NO: 6690 - DNA, 13 bp, Artificial Sequence
  synthetic sequence
gtgccaacagcat

SEQ ID NO: 6691 - DNA, 13 bp, Artificial Sequence
  synthetic sequence
ggaaactttgaag

SEQ ID NO: 6692 - DNA, 13 bp, Artificial Sequence
  synthetic sequence
agttggagcctta

SEQ ID NO: 6693 - DNA, 13 bp, Artificial Sequence
  synthetic sequence
gggagactttgaa

SEQ ID NO: 6694 - DNA, 13 bp, Artificial Sequence
  synthetic sequence
acgggataattgc

SEQ ID NO: 6695 - DNA, 13 bp, Artificial Sequence
  synthetic sequence
agttggagcttat

SEQ ID NO: 6696 - DNA, 13 bp, Artificial Sequence
  synthetic sequence
cagttggagcttg

SEQ ID NO: 6697 - DNA, 13 bp, Artificial Sequence
  synthetic sequence
gatggtgatagcc

SEQ ID NO: 6698 - DNA, 13 bp, Artificial Sequence
  synthetic sequence
agcaagcttaagc

SEQ ID NO: 6699 - DNA, 13 bp, Artificial Sequence
  synthetic sequence
gggctattagtac

SEQ ID NO: 6700 - DNA, 13 bp, Artificial Sequence
  synthetic sequence
tcgggtctaatcc

SEQ ID NO: 6701 - DNA, 13 bp, Artificial Sequence
  synthetic sequence
ctcacgacgttct

SEQ ID NO: 6702 - DNA, 13 bp, Artificial Sequence
  synthetic sequence
tcaatcgccttag

SEQ ID NO: 6703 - DNA, 13 bp, Artificial Sequence
  synthetic sequence
gcacgcctccgtt

SEQ ID NO: 6704 - DNA, 13 bp, Artificial Sequence
  synthetic sequence
gatacctccagca

SEQ ID NO: 6705 - DNA, 13 bp, Artificial Sequence
  synthetic sequence
aggatggctgctt

SEQ ID NO: 6706 - DNA, 13 bp, Artificial Sequence
  synthetic sequence
ctggtacaccaga

SEQ ID NO: 6707 - DNA, 13 bp, Artificial Sequence
  synthetic sequence
aaaaggtacgctg

SEQ ID NO: 6708 - DNA, 13 bp, Artificial Sequence
  synthetic sequence
cgatatgaactct

SEQ ID NO: 6709 - DNA, 13 bp, Artificial Sequence
  synthetic sequence
ggcctttcacccc

SEQ ID NO: 6710 - DNA, 13 bp, Artificial Sequence
  synthetic sequence
ctgtgtttttagt

SEQ ID NO: 6711 - DNA, 13 bp, Artificial Sequence
  synthetic sequence
tcagtgctctacc

SEQ ID NO: 6712 - DNA, 13 bp, Artificial Sequence
  synthetic sequence
tatgaccgacttt

SEQ ID NO: 6713 - DNA, 13 bp, Artificial Sequence
  synthetic sequence
cgttacgccattc

SEQ ID NO: 6714 - DNA, 13 bp, Artificial Sequence
  synthetic sequence
agatatttcagtt

SEQ ID NO: 6715 - DNA, 13 bp, Artificial Sequence
  synthetic sequence
tccgactaaccct

SEQ ID NO: 6716 - DNA, 13 bp, Artificial Sequence
  synthetic sequence
ccacggacttagc

SEQ ID NO: 6717 - DNA, 13 bp, Artificial Sequence
  synthetic sequence
aatgtaaagctat

SEQ ID NO: 6718 - DNA, 13 bp, Artificial Sequence
  synthetic sequence
tctatttcactcc

SEQ ID NO: 6719 - DNA, 13 bp, Artificial Sequence
  synthetic sequence
ttactggggcttc

SEQ ID NO: 6720 - DNA, 13 bp, Artificial Sequence
  synthetic sequence
atggggaaatcta

SEQ ID NO: 6721 - DNA, 13 bp, Artificial Sequence
  synthetic sequence
aggatggtccccc

SEQ ID NO: 6722 - DNA, 13 bp, Artificial Sequence
  synthetic sequence
gtggtatctcaag

SEQ ID NO: 6723 - DNA, 13 bp, Artificial Sequence
  synthetic sequence
caatccaataagg

SEQ ID NO: 6724 - DNA, 13 bp, Artificial Sequence
  synthetic sequence
gcttgagccccgt

SEQ ID NO: 6725 - DNA, 13 bp, Artificial Sequence
  synthetic sequence
agtattctaattt

SEQ ID NO: 6726 - DNA, 13 bp, Artificial Sequence
  synthetic sequence
ctttagccccgtt

SEQ ID NO: 6727 - DNA, 13 bp, Artificial Sequence
  synthetic sequence
cattccagtttct

SEQ ID NO: 6728 - DNA, 13 bp, Artificial Sequence
  synthetic sequence
ttaaggcatgcgt

SEQ ID NO: 6729 - DNA, 13 bp, Artificial Sequence
  synthetic sequence
ctctttaaagcac

SEQ ID NO: 6730 - DNA, 13 bp, Artificial Sequence
  synthetic sequence
aatgtaaagagtg

SEQ ID NO: 6731 - DNA, 13 bp, Artificial Sequence
  synthetic sequence
gtggatgccttgg

SEQ ID NO: 6732 - DNA, 13 bp, Artificial Sequence
  synthetic sequence
gaaatcctgtctg

SEQ ID NO: 6733 - DNA, 13 bp, Artificial Sequence
  synthetic sequence
tgagaatgctgac

SEQ ID NO: 6734 - DNA, 13 bp, Artificial Sequence
  synthetic sequence
catttaaagaaag

SEQ ID NO: 6735 - DNA, 13 bp, Artificial Sequence
  synthetic sequence
agacggtcatagt

SEQ ID NO: 6736 - DNA, 13 bp, Artificial Sequence
  synthetic sequence
ctccagggggtag

SEQ ID NO: 6737 - DNA, 13 bp, Artificial Sequence
  synthetic sequence
ctccaacgtagac

SEQ ID NO: 6738 - DNA, 13 bp, Artificial Sequence
  synthetic sequence
ggtgaaaggccaa

SEQ ID NO: 6739 - DNA, 13 bp, Artificial Sequence
  synthetic sequence
aaatagctcccac

SEQ ID NO: 6740 - DNA, 13 bp, Artificial Sequence
  synthetic sequence
cgacggggttgtt

SEQ ID NO: 6741 - DNA, 13 bp, Artificial Sequence
  synthetic sequence
gccgaaaggcgta

SEQ ID NO: 6742 - DNA, 13 bp, Artificial Sequence
  synthetic sequence
aaacacagggctc

SEQ ID NO: 6743 - DNA, 13 bp, Artificial Sequence
  synthetic sequence
ggattagacccga

SEQ ID NO: 6744 - DNA, 13 bp, Artificial Sequence
  synthetic sequence
ttgagagaactac

SEQ ID NO: 6745 - DNA, 13 bp, Artificial Sequence
  synthetic sequence
gtaccttttgtat

SEQ ID NO: 6746 - DNA, 13 bp, Artificial Sequence
  synthetic sequence
cgaatggggcaac

SEQ ID NO: 6747 - DNA, 13 bp, Artificial Sequence
  synthetic sequence
gggaaaggtgaaa

SEQ ID NO: 6748 - DNA, 13 bp, Artificial Sequence
  synthetic sequence
attgaagccccag

SEQ ID NO: 6749 - DNA, 13 bp, Artificial Sequence
  synthetic sequence
aacgtccgtcgtg

SEQ ID NO: 6750 - DNA, 13 bp, Artificial Sequence
  synthetic sequence
tttacactggcat

SEQ ID NO: 6751 - DNA, 13 bp, Artificial Sequence
  synthetic sequence
agtggcgagcgaa

SEQ ID NO: 6752 - DNA, 13 bp, Artificial Sequence
  synthetic sequence
ccatacaccgaag

SEQ ID NO: 6753 - DNA, 13 bp, Artificial Sequence
  synthetic sequence
aacggtcggaaat

SEQ ID NO: 6754 - DNA, 13 bp, Artificial Sequence
  synthetic sequence
aacgcagggaact

SEQ ID NO: 6755 - DNA, 13 bp, Artificial Sequence
  synthetic sequence
aataccaccctta

SEQ ID NO: 6756 - DNA, 13 bp, Artificial Sequence
  synthetic sequence
gatagggaccgaa

SEQ ID NO: 6757 - DNA, 13 bp, Artificial Sequence
  synthetic sequence
aagcaggaaccct

SEQ ID NO: 6758 - DNA, 13 bp, Artificial Sequence
  synthetic sequence
tgtttgtaggcat

SEQ ID NO: 6759 - DNA, 13 bp, Artificial Sequence
  synthetic sequence
gtcacgcttcttc

SEQ ID NO: 6760 - DNA, 13 bp, Artificial Sequence
  synthetic sequence
gccatacccttgg

SEQ ID NO: 6761 - DNA, 13 bp, Artificial Sequence
  synthetic sequence
taaccttccagca

SEQ ID NO: 6762 - DNA, 13 bp, Artificial Sequence
  synthetic sequence
cgttacattttcg

SEQ ID NO: 6763 - DNA, 13 bp, Artificial Sequence
  synthetic sequence
cgtgcaggtcgga

SEQ ID NO: 6764 - DNA, 13 bp, Artificial Sequence
  synthetic sequence
acaggtccacgaa

SEQ ID NO: 6765 - DNA, 13 bp, Artificial Sequence
  synthetic sequence
ttttatccgttga

SEQ ID NO: 6766 - DNA, 13 bp, Artificial Sequence
  synthetic sequence
agatttcgcggag

SEQ ID NO: 6767 - DNA, 13 bp, Artificial Sequence
  synthetic sequence
ctttcgctacgcc

SEQ ID NO: 6768 - DNA, 13 bp, Artificial Sequence
  synthetic sequence
cctgtgtcggttt

SEQ ID NO: 6769 - DNA, 13 bp, Artificial Sequence
  synthetic sequence
ttatgccattgca

SEQ ID NO: 6770 - DNA, 13 bp, Artificial Sequence
  synthetic sequence
caggtacttagat

SEQ ID NO: 6771 - DNA, 13 bp, Artificial Sequence
  synthetic sequence
atgcacgagtact

SEQ ID NO: 6772 - DNA, 13 bp, Artificial Sequence
  synthetic sequence
tcttccaggtatt

SEQ ID NO: 6773 - DNA, 13 bp, Artificial Sequence
  synthetic sequence
cagtaagtgttac

SEQ ID NO: 6774 - DNA, 13 bp, Artificial Sequence
  synthetic sequence
cataacttgggga

SEQ ID NO: 6775 - DNA, 13 bp, Artificial Sequence
  synthetic sequence
accgccccagtca

SEQ ID NO: 6776 - DNA, 13 bp, Artificial Sequence
  synthetic sequence
ttacggaacgctc

SEQ ID NO: 6777 - DNA, 13 bp, Artificial Sequence
  synthetic sequence
ccgcatcttcacg

SEQ ID NO: 6778 - DNA, 13 bp, Artificial Sequence
  synthetic sequence
caaggatgactcc

SEQ ID NO: 6779 - DNA, 13 bp, Artificial Sequence
  synthetic sequence
acgggactatcac

SEQ ID NO: 6780 - DNA, 13 bp, Artificial Sequence
  synthetic sequence
ctaaactgtcttt

SEQ ID NO: 6781 - DNA, 13 bp, Artificial Sequence
  synthetic sequence
aaacagcttaatt

SEQ ID NO: 6782 - DNA, 13 bp, Artificial Sequence
  synthetic sequence
ctagaaacctaaa

SEQ ID NO: 6783 - DNA, 13 bp, Artificial Sequence
  synthetic sequence
gtcgagctttcca

SEQ ID NO: 6784 - DNA, 13 bp, Artificial Sequence
  synthetic sequence
aattagtattagt

SEQ ID NO: 6785 - DNA, 13 bp, Artificial Sequence
  synthetic sequence
tactcgaccagtg

SEQ ID NO: 6786 - DNA, 13 bp, Artificial Sequence
  synthetic sequence
tctcaaatatcca

SEQ ID NO: 6787 - DNA, 13 bp, Artificial Sequence
  synthetic sequence
ggcaggtgtcagt

SEQ ID NO: 6788 - DNA, 13 bp, Artificial Sequence
  synthetic sequence
aggctgaacttaa

SEQ ID NO: 6789 - DNA, 13 bp, Artificial Sequence
  synthetic sequence
cttttccacttaa

SEQ ID NO: 6790 - DNA, 13 bp, Artificial Sequence
  synthetic sequence
ttatccccggagt

SEQ ID NO: 6791 - DNA, 13 bp, Artificial Sequence
  synthetic sequence
gctaccttaggac

SEQ ID NO: 6792 - DNA, 13 bp, Artificial Sequence
  synthetic sequence
ccgtctaaccaca

SEQ ID NO: 6793 - DNA, 13 bp, Artificial Sequence
  synthetic sequence
tcgacttgtcagt

SEQ ID NO: 6794 - DNA, 13 bp, Artificial Sequence
  synthetic sequence
gtcggtttgcggt

SEQ ID NO: 6795 - DNA, 13 bp, Artificial Sequence
  synthetic sequence
cttcccacttaga

SEQ ID NO: 6796 - DNA, 13 bp, Artificial Sequence
  synthetic sequence
ttaagactcgctt

SEQ ID NO: 6797 - DNA, 13 bp, Artificial Sequence
  synthetic sequence
atagcattcggag

SEQ ID NO: 6798 - DNA, 13 bp, Artificial Sequence
  synthetic sequence
ttctgatacctcc

SEQ ID NO: 6799 - DNA, 13 bp, Artificial Sequence
  synthetic sequence
ctctttaggaggc

SEQ ID NO: 6800 - DNA, 13 bp, Artificial Sequence
  synthetic sequence
aggaaaccttagg

SEQ ID NO: 6801 - DNA, 13 bp, Artificial Sequence
  synthetic sequence
aatgtttgcttct

SEQ ID NO: 6802 - DNA, 13 bp, Artificial Sequence
  synthetic sequence
taggacctgctcc

SEQ ID NO: 6803 - DNA, 13 bp, Artificial Sequence
  synthetic sequence
gtctcccacctat

SEQ ID NO: 6804 - DNA, 13 bp, Artificial Sequence
  synthetic sequence
agagtggtctccc

SEQ ID NO: 6805 - DNA, 13 bp, Artificial Sequence
  synthetic sequence
ttcggccctccac

SEQ ID NO: 6806 - DNA, 13 bp, Artificial Sequence
  synthetic sequence
gaaactataagag

SEQ ID NO: 6807 - DNA, 13 bp, Artificial Sequence
  synthetic sequence
tgactgcttgtaa

SEQ ID NO: 6808 - DNA, 13 bp, Artificial Sequence
  synthetic sequence
ttcctcagggtac

SEQ ID NO: 6809 - DNA, 13 bp, Artificial Sequence
  synthetic sequence
gaccatttttatg

SEQ ID NO: 6810 - DNA, 13 bp, Artificial Sequence
  synthetic sequence
cgtcctacaaccc

SEQ ID NO: 6811 - DNA, 13 bp, Artificial Sequence
  synthetic sequence
actcatcatcaca

SEQ ID NO: 6812 - DNA, 13 bp, Artificial Sequence
  synthetic sequence
tcatcatcatatc

SEQ ID NO: 6813 - DNA, 13 bp, Artificial Sequence
  synthetic sequence
accctctaaatgc

SEQ ID NO: 6814 - DNA, 13 bp, Artificial Sequence
  synthetic sequence
gagctttaaggcg

SEQ ID NO: 6815 - DNA, 13 bp, Artificial Sequence
  synthetic sequence
ggtctctgcaaat

SEQ ID NO: 6816 - DNA, 13 bp, Artificial Sequence
  synthetic sequence
tacctttaaagag

SEQ ID NO: 6817 - DNA, 13 bp, Artificial Sequence
  synthetic sequence
ggaactctgcaaa

SEQ ID NO: 6818 - DNA, 13 bp, Artificial Sequence
  synthetic sequence
acaacccagacca

SEQ ID NO: 6819 - DNA, 13 bp, Artificial Sequence
  synthetic sequence
ggcgtgccttttg

SEQ ID NO: 6820 - DNA, 13 bp, Artificial Sequence
  synthetic sequence
aagcgccgtcact

SEQ ID NO: 6821 - DNA, 13 bp, Artificial Sequence
  synthetic sequence
atttggacgctgt

SEQ ID NO: 6822 - DNA, 13 bp, Artificial Sequence
  synthetic sequence
ttctaaggttagg

SEQ ID NO: 6823 - DNA, 13 bp, Artificial Sequence
  synthetic sequence
ttctaaggttagg

SEQ ID NO: 6824 - DNA, 13 bp, Artificial Sequence
  synthetic sequence
gaaacgggttaat

SEQ ID NO: 6825 - DNA, 13 bp, Artificial Sequence
  synthetic sequence
ctcgatgtcggct

SEQ ID NO: 6826 - DNA, 13 bp, Artificial Sequence
  synthetic sequence
atgagctgtgaat

SEQ ID NO: 6827 - DNA, 13 bp, Artificial Sequence
  synthetic sequence
ggaggtgcgcaaa

SEQ ID NO: 6828 - DNA, 13 bp, Artificial Sequence
  synthetic sequence
agtaaacggcggc

SEQ ID NO: 6829 - DNA, 13 bp, Artificial Sequence
  synthetic sequence
tcagaacgtcgtg

SEQ ID NO: 6830 - DNA, 13 bp, Artificial Sequence
  synthetic sequence
gaaataccaccct

SEQ ID NO: 6831 - DNA, 13 bp, Artificial Sequence
  synthetic sequence
taccgaagctttg

SEQ ID NO: 6832 - DNA, 13 bp, Artificial Sequence
  synthetic sequence
ccgagtgatctat

SEQ ID NO: 6833 - DNA, 13 bp, Artificial Sequence
  synthetic sequence
gccaagggtaagt

SEQ ID NO: 6834 - DNA, 13 bp, Artificial Sequence
  synthetic sequence
gctagggcctgtc

SEQ ID NO: 6835 - DNA, 13 bp, Artificial Sequence
  synthetic sequence
atatagaagaata

SEQ ID NO: 6836 - DNA, 13 bp, Artificial Sequence
  synthetic sequence
gtcctagtttaag

SEQ ID NO: 6837 - DNA, 13 bp, Artificial Sequence
  synthetic sequence
tgaacctttacta

SEQ ID NO: 6838 - DNA, 13 bp, Artificial Sequence
  synthetic sequence
agtggcgagcgaa

SEQ ID NO: 6839 - DNA, 13 bp, Artificial Sequence
  synthetic sequence
cacgagaaacctt

SEQ ID NO: 6840 - DNA, 13 bp, Artificial Sequence
  synthetic sequence
taatagaggcgat

SEQ ID NO: 6841 - DNA, 13 bp, Artificial Sequence
  synthetic sequence
tagatgctaatta

SEQ ID NO: 6842 - DNA, 13 bp, Artificial Sequence
  synthetic sequence
gagaaaccctgtc

SEQ ID NO: 6843 - DNA, 13 bp, Artificial Sequence
  synthetic sequence
tattgagatttga

SEQ ID NO: 6844 - DNA, 13 bp, Artificial Sequence
  synthetic sequence
ttagcctaaactt

SEQ ID NO: 6845 - DNA, 13 bp, Artificial Sequence
  synthetic sequence
aggggagtagccc

SEQ ID NO: 6846 - DNA, 13 bp, Artificial Sequence
  synthetic sequence
tgattttagtagg

SEQ ID NO: 6847 - DNA, 13 bp, Artificial Sequence
  synthetic sequence
gccttggcatgca

SEQ ID NO: 6848 - DNA, 13 bp, Artificial Sequence
  synthetic sequence
gcgaacgcggacc

SEQ ID NO: 6849 - DNA, 13 bp, Artificial Sequence
  synthetic sequence
ggttccaggaaat

SEQ ID NO: 6850 - DNA, 13 bp, Artificial Sequence
  synthetic sequence
aaataaggtatct

SEQ ID NO: 6851 - DNA, 13 bp, Artificial Sequence
  synthetic sequence
ataaagggagtga

SEQ ID NO: 6852 - DNA, 13 bp, Artificial Sequence
  synthetic sequence
actggcattcgtg

SEQ ID NO: 6853 - DNA, 13 bp, Artificial Sequence
  synthetic sequence
cgaaccagtaccg

SEQ ID NO: 6854 - DNA, 13 bp, Artificial Sequence
  synthetic sequence
gaatacccccggg

SEQ ID NO: 6855 - DNA, 13 bp, Artificial Sequence
  synthetic sequence
tccctatcagagc

SEQ ID NO: 6856 - DNA, 13 bp, Artificial Sequence
  synthetic sequence
ggacgtatctctg

SEQ ID NO: 6857 - DNA, 13 bp, Artificial Sequence
  synthetic sequence
tgacttgtggcta

SEQ ID NO: 6858 - DNA, 13 bp, Artificial Sequence
  synthetic sequence
aagccccagtaaa

SEQ ID NO: 6859 - DNA, 13 bp, Artificial Sequence
  synthetic sequence
gtataatgggtca

SEQ ID NO: 6860 - DNA, 13 bp, Artificial Sequence
  synthetic sequence
gcaacccacctta

SEQ ID NO: 6861 - DNA, 13 bp, Artificial Sequence
  synthetic sequence
tggtcccgcgtgg

SEQ ID NO: 6862 - DNA, 13 bp, Artificial Sequence
  synthetic sequence
ggcacctcgatgt

SEQ ID NO: 6863 - DNA, 13 bp, Artificial Sequence
  synthetic sequence
cgatgcattagac

SEQ ID NO: 6864 - DNA, 13 bp, Artificial Sequence
  synthetic sequence
tcagaacggtcgg

SEQ ID NO: 6865 - DNA, 13 bp, Artificial Sequence
  synthetic sequence
acgtatgtgcgtg

SEQ ID NO: 6866 - DNA, 13 bp, Artificial Sequence
  synthetic sequence
cgggtgctaacgt

SEQ ID NO: 6867 - DNA, 13 bp, Artificial Sequence
  synthetic sequence
cggcaaaatgcac

SEQ ID NO: 6868 - DNA, 13 bp, Artificial Sequence
  synthetic sequence
aactgcggcccgt

SEQ ID NO: 6869 - DNA, 13 bp, Artificial Sequence
  synthetic sequence
cagactcagtgaa

SEQ ID NO: 6870 - DNA, 13 bp, Artificial Sequence
  synthetic sequence
agtagggcgggac

SEQ ID NO: 6871 - DNA, 13 bp, Artificial Sequence
  synthetic sequence
cccatgtgggccg

SEQ ID NO: 6872 - DNA, 13 bp, Artificial Sequence
  synthetic sequence
tttaaagaaagcg

SEQ ID NO: 6873 - DNA, 13 bp, Artificial Sequence
  synthetic sequence
cgtcgtgagacag

SEQ ID NO: 6874 - DNA, 13 bp, Artificial Sequence
  synthetic sequence
tttaccaaaaaca

SEQ ID NO: 6875 - DNA, 13 bp, Artificial Sequence
  synthetic sequence
gtcgatgggaacc

SEQ ID NO: 6876 - DNA, 13 bp, Artificial Sequence
  synthetic sequence
attagtaccggta

SEQ ID NO: 6877 - DNA, 13 bp, Artificial Sequence
  synthetic sequence
tagaaagctgtgc

SEQ ID NO: 6878 - DNA, 13 bp, Artificial Sequence
  synthetic sequence
gtaccttttatcc

SEQ ID NO: 6879 - DNA, 13 bp, Artificial Sequence
  synthetic sequence
caggaacccttgg

SEQ ID NO: 6880 - DNA, 13 bp, Artificial Sequence
  synthetic sequence
accgtaccttcaa

SEQ ID NO: 6881 - DNA, 13 bp, Artificial Sequence
  synthetic sequence
cgtactagggaca

SEQ ID NO: 6882 - DNA, 13 bp, Artificial Sequence
  synthetic sequence
ccccggtacattt

SEQ ID NO: 6883 - DNA, 13 bp, Artificial Sequence
  synthetic sequence
ttgggacctgctc

SEQ ID NO: 6884 - DNA, 13 bp, Artificial Sequence
  synthetic sequence
aaggctggcgccc

SEQ ID NO: 6885 - DNA, 13 bp, Artificial Sequence
  synthetic sequence
acaggcttacgga

SEQ ID NO: 6886 - DNA, 13 bp, Artificial Sequence
  synthetic sequence
ttcgctgcgccta

SEQ ID NO: 6887 - DNA, 13 bp, Artificial Sequence
  synthetic sequence
acgggactatcac

SEQ ID NO: 6888 - DNA, 13 bp, Artificial Sequence
  synthetic sequence
acaaggaatttcg

SEQ ID NO: 6889 - DNA, 13 bp, Artificial Sequence
  synthetic sequence
cagaccctatacg

SEQ ID NO: 6890 - DNA, 13 bp, Artificial Sequence
  synthetic sequence
ttgctccaacaaa

SEQ ID NO: 6891 - DNA, 13 bp, Artificial Sequence
  synthetic sequence
cggtttagggtac

SEQ ID NO: 6892 - DNA, 13 bp, Artificial Sequence
  synthetic sequence
ggttgcccatagt

SEQ ID NO: 6893 - DNA, 13 bp, Artificial Sequence
  synthetic sequence
tgggctccaactg

SEQ ID NO: 6894 - DNA, 13 bp, Artificial Sequence
  synthetic sequence
cagtcttgcagtc

SEQ ID NO: 6895 - DNA, 13 bp, Artificial Sequence
  synthetic sequence
gtggtcgacccat

SEQ ID NO: 6896 - DNA, 13 bp, Artificial Sequence
  synthetic sequence
gaaccagctatct

SEQ ID NO: 6897 - DNA, 13 bp, Artificial Sequence
  synthetic sequence
cttcagcggttat

SEQ ID NO: 6898 - DNA, 13 bp, Artificial Sequence
  synthetic sequence
cccacttagccat

SEQ ID NO: 6899 - DNA, 13 bp, Artificial Sequence
  synthetic sequence
ggtattcggagtt

SEQ ID NO: 6900 - DNA, 13 bp, Artificial Sequence
  synthetic sequence
aggcccacgaata

SEQ ID NO: 6901 - DNA, 13 bp, Artificial Sequence
  synthetic sequence
tcaaactacccac

SEQ ID NO: 6902 - DNA, 13 bp, Artificial Sequence
  synthetic sequence
aaccccgcatctt

SEQ ID NO: 6903 - DNA, 13 bp, Artificial Sequence
  synthetic sequence
agtctcgtttgat

SEQ ID NO: 6904 - DNA, 13 bp, Artificial Sequence
  synthetic sequence
aggtatccgaatg

SEQ ID NO: 6905 - DNA, 13 bp, Artificial Sequence
  synthetic sequence
agcttcgttgtcg

SEQ ID NO: 6906 - DNA, 13 bp, Artificial Sequence
  synthetic sequence
tgtcgggtaagtt

SEQ ID NO: 6907 - DNA, 13 bp, Artificial Sequence
  synthetic sequence
caatgccaaaagg

SEQ ID NO: 6908 - DNA, 13 bp, Artificial Sequence
  synthetic sequence
gttgaaaaaggtt

SEQ ID NO: 6909 - DNA, 13 bp, Artificial Sequence
  synthetic sequence
ggcgtgccttttg

SEQ ID NO: 6910 - DNA, 13 bp, Artificial Sequence
  synthetic sequence
taggttgactgca

SEQ ID NO: 6911 - DNA, 13 bp, Artificial Sequence
  synthetic sequence
aagcacgcggacg

SEQ ID NO: 6912 - DNA, 13 bp, Artificial Sequence
  synthetic sequence
agaccccgtgaac

SEQ ID NO: 6913 - DNA, 13 bp, Artificial Sequence
  synthetic sequence
cctcggataataa

SEQ ID NO: 6914 - DNA, 13 bp, Artificial Sequence
  synthetic sequence
gccaccaagagtt

SEQ ID NO: 6915 - DNA, 13 bp, Artificial Sequence
  synthetic sequence
tactgtgaaggaa

SEQ ID NO: 6916 - DNA, 13 bp, Artificial Sequence
  synthetic sequence
tggcttagaggca

SEQ ID NO: 6917 - DNA, 13 bp, Artificial Sequence
  synthetic sequence
actagtgaagatc

SEQ ID NO: 6918 - DNA, 13 bp, Artificial Sequence
  synthetic sequence
ggaggaaccgatg

SEQ ID NO: 6919 - DNA, 13 bp, Artificial Sequence
  synthetic sequence
ataagcattgaaa

SEQ ID NO: 6920 - DNA, 13 bp, Artificial Sequence
  synthetic sequence
ataactttcgtta

SEQ ID NO: 6921 - DNA, 13 bp, Artificial Sequence
  synthetic sequence
ctgcgtagacgat

SEQ ID NO: 6922 - DNA, 13 bp, Artificial Sequence
  synthetic sequence
agcataaaaccga

SEQ ID NO: 6923 - DNA, 13 bp, Artificial Sequence
  synthetic sequence
gggcggtatcctc

SEQ ID NO: 6924 - DNA, 13 bp, Artificial Sequence
  synthetic sequence
aactgaaacatct

SEQ ID NO: 6925 - DNA, 13 bp, Artificial Sequence
  synthetic sequence
gaccggaatggac

SEQ ID NO: 6926 - DNA, 13 bp, Artificial Sequence
  synthetic sequence
gagttttaaaaga

SEQ ID NO: 6927 - DNA, 13 bp, Artificial Sequence
  synthetic sequence
caattaaagcggt

SEQ ID NO: 6928 - DNA, 13 bp, Artificial Sequence
  synthetic sequence
ggggccgcagaga

SEQ ID NO: 6929 - DNA, 13 bp, Artificial Sequence
  synthetic sequence
gagaaagaccgac

SEQ ID NO: 6930 - DNA, 13 bp, Artificial Sequence
  synthetic sequence
ttgaaatactggt

SEQ ID NO: 6931 - DNA, 13 bp, Artificial Sequence
  synthetic sequence
ggataaaggatca

SEQ ID NO: 6932 - DNA, 13 bp, Artificial Sequence
  synthetic sequence
tgaagaagcgagg

SEQ ID NO: 6933 - DNA, 13 bp, Artificial Sequence
  synthetic sequence
gtattggttagct

SEQ ID NO: 6934 - DNA, 13 bp, Artificial Sequence
  synthetic sequence
gttaagcgacggc

SEQ ID NO: 6935 - DNA, 13 bp, Artificial Sequence
  synthetic sequence
tttggtacggtca

SEQ ID NO: 6936 - DNA, 13 bp, Artificial Sequence
  synthetic sequence
gggcttacggcga

SEQ ID NO: 6937 - DNA, 13 bp, Artificial Sequence
  synthetic sequence
ctttcgttgagac

SEQ ID NO: 6938 - DNA, 13 bp, Artificial Sequence
  synthetic sequence
ataacaaaccaaa

SEQ ID NO: 6939 - DNA, 13 bp, Artificial Sequence
  synthetic sequence
catagttttaccc

SEQ ID NO: 6940 - DNA, 13 bp, Artificial Sequence
  synthetic sequence
taacctgctgctc

SEQ ID NO: 6941 - DNA, 13 bp, Artificial Sequence
  synthetic sequence
aaccgacacacca

SEQ ID NO: 6942 - DNA, 13 bp, Artificial Sequence
  synthetic sequence
cagggcttaggtt

SEQ ID NO: 6943 - DNA, 13 bp, Artificial Sequence
  synthetic sequence
gtgattgccaacc

SEQ ID NO: 6944 - DNA, 13 bp, Artificial Sequence
  synthetic sequence
actctttaaatga

SEQ ID NO: 6945 - DNA, 13 bp, Artificial Sequence
  synthetic sequence
agaccaaactgtc

SEQ ID NO: 6946 - DNA, 13 bp, Artificial Sequence
  synthetic sequence
agtttgatttccg

SEQ ID NO: 6947 - DNA, 13 bp, Artificial Sequence
  synthetic sequence
gccgacatcgagg

SEQ ID NO: 6948 - DNA, 13 bp, Artificial Sequence
  synthetic sequence
gtagtctacatgg

SEQ ID NO: 6949 - DNA, 13 bp, Artificial Sequence
  synthetic sequence
cgccgctacacag

SEQ ID NO: 6950 - DNA, 13 bp, Artificial Sequence
  synthetic sequence
gactagtatttag

SEQ ID NO: 6951 - DNA, 13 bp, Artificial Sequence
  synthetic sequence
agtcaccctaaaa

SEQ ID NO: 6952 - DNA, 13 bp, Artificial Sequence
  synthetic sequence
ataaaattaggga

SEQ ID NO: 6953 - DNA, 13 bp, Artificial Sequence
  synthetic sequence
tactacgctctcc

SEQ ID NO: 6954 - DNA, 13 bp, Artificial Sequence
  synthetic sequence
ctatttcactccc

SEQ ID NO: 6955 - DNA, 13 bp, Artificial Sequence
  synthetic sequence
acaccatatactt

SEQ ID NO: 6956 - DNA, 13 bp, Artificial Sequence
  synthetic sequence
agcggatttgcct

SEQ ID NO: 6957 - DNA, 13 bp, Artificial Sequence
  synthetic sequence
cccttaacctcgc

SEQ ID NO: 6958 - DNA, 13 bp, Artificial Sequence
  synthetic sequence
actatcaccctgt

SEQ ID NO: 6959 - DNA, 13 bp, Artificial Sequence
  synthetic sequence
gaataatgttaga

SEQ ID NO: 6960 - DNA, 13 bp, Artificial Sequence
  synthetic sequence
ctccaagtttgat

SEQ ID NO: 6961 - DNA, 13 bp, Artificial Sequence
  synthetic sequence
atggtcaagtgaa

SEQ ID NO: 6962 - DNA, 13 bp, Artificial Sequence
  synthetic sequence
tccgaatggggaa

SEQ ID NO: 6963 - DNA, 13 bp, Artificial Sequence
  synthetic sequence
ctaaaaacacagc

SEQ ID NO: 6964 - DNA, 13 bp, Artificial Sequence
  synthetic sequence
acgataatgtggg

SEQ ID NO: 6965 - DNA, 13 bp, Artificial Sequence
  synthetic sequence
atagccccgtacg

SEQ ID NO: 6966 - DNA, 13 bp, Artificial Sequence
  synthetic sequence
gggagtgaaatag

SEQ ID NO: 6967 - DNA, 13 bp, Artificial Sequence
  synthetic sequence
tgccatctgtctt

SEQ ID NO: 6968 - DNA, 13 bp, Artificial Sequence
  synthetic sequence
ggtattgtaaaac

SEQ ID NO: 6969 - DNA, 13 bp, Artificial Sequence
  synthetic sequence
acgatgtgggaag

SEQ ID NO: 6970 - DNA, 13 bp, Artificial Sequence
  synthetic sequence
ttattttaattgc

SEQ ID NO: 6971 - DNA, 13 bp, Artificial Sequence
  synthetic sequence
catctaagtaccc

SEQ ID NO: 6972 - DNA, 13 bp, Artificial Sequence
  synthetic sequence
tgactgaacatgg

SEQ ID NO: 6973 - DNA, 13 bp, Artificial Sequence
  synthetic sequence
ctcggagatagct

SEQ ID NO: 6974 - DNA, 13 bp, Artificial Sequence
  synthetic sequence
tatctagctttga

SEQ ID NO: 6975 - DNA, 13 bp, Artificial Sequence
  synthetic sequence
taatattcccgta

SEQ ID NO: 6976 - DNA, 13 bp, Artificial Sequence
  synthetic sequence
gagcttaaccgtc

SEQ ID NO: 6977 - DNA, 13 bp, Artificial Sequence
  synthetic sequence
atggggttagccc

SEQ ID NO: 6978 - DNA, 13 bp, Artificial Sequence
  synthetic sequence
ctcactggtcgag

SEQ ID NO: 6979 - DNA, 13 bp, Artificial Sequence
  synthetic sequence
cgcaataactatc

SEQ ID NO: 6980 - DNA, 13 bp, Artificial Sequence
  synthetic sequence
ttcgggagaaggt

SEQ ID NO: 6981 - DNA, 13 bp, Artificial Sequence
  synthetic sequence
attggcaagccaa

SEQ ID NO: 6982 - DNA, 13 bp, Artificial Sequence
  synthetic sequence
tcaggtaacactg

SEQ ID NO: 6983 - DNA, 13 bp, Artificial Sequence
  synthetic sequence
ccaagaagtttta

SEQ ID NO: 6984 - DNA, 13 bp, Artificial Sequence
  synthetic sequence
gtggtttaagtgt

SEQ ID NO: 6985 - DNA, 13 bp, Artificial Sequence
  synthetic sequence
gatttttactacc

SEQ ID NO: 6986 - DNA, 13 bp, Artificial Sequence
  synthetic sequence
tctgtcatctgtc

SEQ ID NO: 6987 - DNA, 13 bp, Artificial Sequence
  synthetic sequence
ggatggctgcttc

SEQ ID NO: 6988 - DNA, 13 bp, Artificial Sequence
  synthetic sequence
atacgtcctctta

SEQ ID NO: 6989 - DNA, 13 bp, Artificial Sequence
  synthetic sequence
ctggttcgctatc

SEQ ID NO: 6990 - DNA, 13 bp, Artificial Sequence
  synthetic sequence
cgggatggccccc

SEQ ID NO: 6991 - DNA, 13 bp, Artificial Sequence
  synthetic sequence
ggtctactcgttg

SEQ ID NO: 6992 - DNA, 13 bp, Artificial Sequence
  synthetic sequence
cccaggttcgcct

SEQ ID NO: 6993 - DNA, 13 bp, Artificial Sequence
  synthetic sequence
cccttcagcaata

SEQ ID NO: 6994 - DNA, 13 bp, Artificial Sequence
  synthetic sequence
catcccctaattt

SEQ ID NO: 6995 - DNA, 13 bp, Artificial Sequence
  synthetic sequence
ctttcgctcgccg

SEQ ID NO: 6996 - DNA, 13 bp, Artificial Sequence
  synthetic sequence
agttagtttatga

SEQ ID NO: 6997 - DNA, 13 bp, Artificial Sequence
  synthetic sequence
ttatacaaaaggt

SEQ ID NO: 6998 - DNA, 13 bp, Artificial Sequence
  synthetic sequence
caagcgccttggt

SEQ ID NO: 6999 - DNA, 13 bp, Artificial Sequence
  synthetic sequence
ataaaaattaact

SEQ ID NO: 7000 - DNA, 13 bp, Artificial Sequence
  synthetic sequence
ctttgcacgaaca

SEQ ID NO: 7001 - DNA, 13 bp, Artificial Sequence
  synthetic sequence
gcaaggaccttca

SEQ ID NO: 7002 - DNA, 13 bp, Artificial Sequence
  synthetic sequence
gtggctgacctag

SEQ ID NO: 7003 - DNA, 13 bp, Artificial Sequence
  synthetic sequence
acccacattattt

SEQ ID NO: 7004 - DNA, 13 bp, Artificial Sequence
  synthetic sequence
ttcgcacttctga

SEQ ID NO: 7005 - DNA, 13 bp, Artificial Sequence
  synthetic sequence
atttacgtaacta

SEQ ID NO: 7006 - DNA, 13 bp, Artificial Sequence
  synthetic sequence
gctgtttcccttt

SEQ ID NO: 7007 - DNA, 13 bp, Artificial Sequence
  synthetic sequence
cctaaatcaaaac

SEQ ID NO: 7008 - DNA, 13 bp, Artificial Sequence
  synthetic sequence
cttaggggccgac

SEQ ID NO: 7009 - DNA, 13 bp, Artificial Sequence
  synthetic sequence
tggcattcagagg

SEQ ID NO: 7010 - DNA, 13 bp, Artificial Sequence
  synthetic sequence
gcccggtgctgga

SEQ ID NO: 7011 - DNA, 13 bp, Artificial Sequence
  synthetic sequence
ggtactccgggga

SEQ ID NO: 7012 - DNA, 13 bp, Artificial Sequence
  synthetic sequence
accccgtgaacct

SEQ ID NO: 7013 - DNA, 13 bp, Artificial Sequence
  synthetic sequence
agggtatggctgt

SEQ ID NO: 7014 - DNA, 13 bp, Artificial Sequence
  synthetic sequence
aagtgggaagagc

SEQ ID NO: 7015 - DNA, 13 bp, Artificial Sequence
  synthetic sequence
actgcgagagtga

SEQ ID NO: 7016 - DNA, 13 bp, Artificial Sequence
  synthetic sequence
aggaccgaaccca

SEQ ID NO: 7017 - DNA, 13 bp, Artificial Sequence
  synthetic sequence
tgttgggggttgc

SEQ ID NO: 7018 - DNA, 13 bp, Artificial Sequence
  synthetic sequence
tgctggaggtatc

SEQ ID NO: 7019 - DNA, 13 bp, Artificial Sequence
  synthetic sequence
cctgcacgaatgg

SEQ ID NO: 7020 - DNA, 13 bp, Artificial Sequence
  synthetic sequence
agaggaccggagt

SEQ ID NO: 7021 - DNA, 13 bp, Artificial Sequence
  synthetic sequence
aagatttaacggg

SEQ ID NO: 7022 - DNA, 13 bp, Artificial Sequence
  synthetic sequence
gtcccgtatacga

SEQ ID NO: 7023 - DNA, 13 bp, Artificial Sequence
  synthetic sequence
tagagaatactaa

SEQ ID NO: 7024 - DNA, 13 bp, Artificial Sequence
  synthetic sequence
gtaaagcactgtt

SEQ ID NO: 7025 - DNA, 13 bp, Artificial Sequence
  synthetic sequence
gggagacacactg

SEQ ID NO: 7026 - DNA, 13 bp, Artificial Sequence
  synthetic sequence
atggttgtccagg

SEQ ID NO: 7027 - DNA, 13 bp, Artificial Sequence
  synthetic sequence
tagggtaagccgg

SEQ ID NO: 7028 - DNA, 13 bp, Artificial Sequence
  synthetic sequence
aggctaaatactc

SEQ ID NO: 7029 - DNA, 13 bp, Artificial Sequence
  synthetic sequence
aagagtaacggag

SEQ ID NO: 7030 - DNA, 13 bp, Artificial Sequence
  synthetic sequence
aggcccagacagc

SEQ ID NO: 7031 - DNA, 13 bp, Artificial Sequence
  synthetic sequence
cgtagcgaaagcg

SEQ ID NO: 7032 - DNA, 13 bp, Artificial Sequence
  synthetic sequence
atgtgactgcgta

SEQ ID NO: 7033 - DNA, 13 bp, Artificial Sequence
  synthetic sequence
gaaagcatctaag

SEQ ID NO: 7034 - DNA, 13 bp, Artificial Sequence
  synthetic sequence
agctattgatacc

SEQ ID NO: 7035 - DNA, 13 bp, Artificial Sequence
  synthetic sequence
ggggaacccacct

SEQ ID NO: 7036 - DNA, 13 bp, Artificial Sequence
  synthetic sequence
gctacgccagtag

SEQ ID NO: 7037 - DNA, 13 bp, Artificial Sequence
  synthetic sequence
agactttgaagca

SEQ ID NO: 7038 - DNA, 13 bp, Artificial Sequence
  synthetic sequence
aggtactcactcg

SEQ ID NO: 7039 - DNA, 13 bp, Artificial Sequence
  synthetic sequence
tcattagtactgg

SEQ ID NO: 7040 - DNA, 13 bp, Artificial Sequence
  synthetic sequence
gccgtttactggg

SEQ ID NO: 7041 - DNA, 13 bp, Artificial Sequence
  synthetic sequence
cccaggatgtgat

SEQ ID NO: 7042 - DNA, 13 bp, Artificial Sequence
  synthetic sequence
aatatacttagaa

SEQ ID NO: 7043 - DNA, 13 bp, Artificial Sequence
  synthetic sequence
ccttcttccaaag

SEQ ID NO: 7044 - DNA, 13 bp, Artificial Sequence
  synthetic sequence
tcctaagggtact

SEQ ID NO: 7045 - DNA, 13 bp, Artificial Sequence
  synthetic sequence
taccgagtgcacc

SEQ ID NO: 7046 - DNA, 13 bp, Artificial Sequence
  synthetic sequence
ggccatggataga

SEQ ID NO: 7047 - DNA, 13 bp, Artificial Sequence
  synthetic sequence
gagctattacgct

SEQ ID NO: 7048 - DNA, 13 bp, Artificial Sequence
  synthetic sequence
cccaacttgttct

SEQ ID NO: 7049 - DNA, 13 bp, Artificial Sequence
  synthetic sequence
gtgctgtgttttt

SEQ ID NO: 7050 - DNA, 13 bp, Artificial Sequence
  synthetic sequence
aacgctcccctac

SEQ ID NO: 7051 - DNA, 13 bp, Artificial Sequence
  synthetic sequence
gaggatggtcccc

SEQ ID NO: 7052 - DNA, 13 bp, Artificial Sequence
  synthetic sequence
tttcggccaataa

SEQ ID NO: 7053 - DNA, 13 bp, Artificial Sequence
  synthetic sequence
ttcaatttcactg

SEQ ID NO: 7054 - DNA, 13 bp, Artificial Sequence
  synthetic sequence
gattctatttcac

SEQ ID NO: 7055 - DNA, 13 bp, Artificial Sequence
  synthetic sequence
tattcagttatcc

SEQ ID NO: 7056 - DNA, 13 bp, Artificial Sequence
  synthetic sequence
gtccagtgcaaag

SEQ ID NO: 7057 - DNA, 13 bp, Artificial Sequence
  synthetic sequence
ccggatcactaag

SEQ ID NO: 7058 - DNA, 13 bp, Artificial Sequence
  synthetic sequence
cccacggcagata

SEQ ID NO: 7059 - DNA, 13 bp, Artificial Sequence
  synthetic sequence
ccagctatctccg

SEQ ID NO: 7060 - DNA, 13 bp, Artificial Sequence
  synthetic sequence
ctgagttagaact

SEQ ID NO: 7061 - DNA, 13 bp, Artificial Sequence
  synthetic sequence
ggctgtttccctt

SEQ ID NO: 7062 - DNA, 13 bp, Artificial Sequence
  synthetic sequence
tcgtagtctccaa

SEQ ID NO: 7063 - DNA, 13 bp, Artificial Sequence
  synthetic sequence
aggaatattaacc

SEQ ID NO: 7064 - DNA, 13 bp, Artificial Sequence
  synthetic sequence
gagtcagtaaggt

SEQ ID NO: 7065 - DNA, 13 bp, Artificial Sequence
  synthetic sequence
ttctggcgaaaca

SEQ ID NO: 7066 - DNA, 13 bp, Artificial Sequence
  synthetic sequence
ccggatttgccta

SEQ ID NO: 7067 - DNA, 13 bp, Artificial Sequence
  synthetic sequence
agcaagcttaagc

SEQ ID NO: 7068 - DNA, 13 bp, Artificial Sequence
  synthetic sequence
gcaaagtcaatag

SEQ ID NO: 7069 - DNA, 13 bp, Artificial Sequence
  synthetic sequence
tagtcgagaggga

SEQ ID NO: 7070 - DNA, 13 bp, Artificial Sequence
  synthetic sequence
tgtcggctcatca

SEQ ID NO: 7071 - DNA, 13 bp, Artificial Sequence
  synthetic sequence
gtaatagctcact

SEQ ID NO: 7072 - DNA, 13 bp, Artificial Sequence
  synthetic sequence
taactatgacggt

SEQ ID NO: 7073 - DNA, 13 bp, Artificial Sequence
  synthetic sequence
agaacgtcgtgag

SEQ ID NO: 7074 - DNA, 13 bp, Artificial Sequence
  synthetic sequence
caggttaatattc

SEQ ID NO: 7075 - DNA, 13 bp, Artificial Sequence
  synthetic sequence
atgctgaaggaac

SEQ ID NO: 7076 - DNA, 13 bp, Artificial Sequence
  synthetic sequence
agtgatccggtgg

SEQ ID NO: 7077 - DNA, 13 bp, Artificial Sequence
  synthetic sequence
agacccgaaaccg

SEQ ID NO: 7078 - DNA, 13 bp, Artificial Sequence
  synthetic sequence
ctgtctccagtat

SEQ ID NO: 7079 - DNA, 13 bp, Artificial Sequence
  synthetic sequence
ggtagcggagcgt

SEQ ID NO: 7080 - DNA, 13 bp, Artificial Sequence
  synthetic sequence
gttggtcggaaat

SEQ ID NO: 7081 - DNA, 13 bp, Artificial Sequence
  synthetic sequence
caaactcggatat

SEQ ID NO: 7082 - DNA, 13 bp, Artificial Sequence
  synthetic sequence
agctgggtagcta

SEQ ID NO: 7083 - DNA, 13 bp, Artificial Sequence
  synthetic sequence
tgcaggataggtg

SEQ ID NO: 7084 - DNA, 13 bp, Artificial Sequence
  synthetic sequence
ctgaatgagctag

SEQ ID NO: 7085 - DNA, 13 bp, Artificial Sequence
  synthetic sequence
gcgataaagaatg

SEQ ID NO: 7086 - DNA, 13 bp, Artificial Sequence
  synthetic sequence
atattttccagga

SEQ ID NO: 7087 - DNA, 13 bp, Artificial Sequence
  synthetic sequence
agagccgtggaag

SEQ ID NO: 7088 - DNA, 13 bp, Artificial Sequence
  synthetic sequence
tccttgaatcagg

SEQ ID NO: 7089 - DNA, 13 bp, Artificial Sequence
  synthetic sequence
atctaaccgagac

SEQ ID NO: 7090 - DNA, 13 bp, Artificial Sequence
  synthetic sequence
aatattgtccagg

SEQ ID NO: 7091 - DNA, 13 bp, Artificial Sequence
  synthetic sequence
acttccccattag

SEQ ID NO: 7092 - DNA, 13 bp, Artificial Sequence
  synthetic sequence
ggtcatacaggct

SEQ ID NO: 7093 - DNA, 13 bp, Artificial Sequence
  synthetic sequence
tctccccattaaa

SEQ ID NO: 7094 - DNA, 13 bp, Artificial Sequence
  synthetic sequence
aatcgagctatta

SEQ ID NO: 7095 - DNA, 13 bp, Artificial Sequence
  synthetic sequence
gcttagatgcatt

SEQ ID NO: 7096 - DNA, 13 bp, Artificial Sequence
  synthetic sequence
acgtaccacttta

SEQ ID NO: 7097 - DNA, 13 bp, Artificial Sequence
  synthetic sequence
gaccgccccagtc

SEQ ID NO: 7098 - DNA, 13 bp, Artificial Sequence
  synthetic sequence
acaaggaatttcg

SEQ ID NO: 7099 - DNA, 13 bp, Artificial Sequence
  synthetic sequence
ctagcttatgcca

SEQ ID NO: 7100 - DNA, 13 bp, Artificial Sequence
  synthetic sequence
tcggtcctctcgt

SEQ ID NO: 7101 - DNA, 13 bp, Artificial Sequence
  synthetic sequence
tagttgttttggt

SEQ ID NO: 7102 - DNA, 13 bp, Artificial Sequence
  synthetic sequence
cctgttatccccg

SEQ ID NO: 7103 - DNA, 13 bp, Artificial Sequence
  synthetic sequence
ctacctaaataga

SEQ ID NO: 7104 - DNA, 13 bp, Artificial Sequence
  synthetic sequence
acttccgatacct

SEQ ID NO: 7105 - DNA, 13 bp, Artificial Sequence
  synthetic sequence
cgccttggtatac

SEQ ID NO: 7106 - DNA, 13 bp, Artificial Sequence
  synthetic sequence
taatcttccagca

SEQ ID NO: 7107 - DNA, 13 bp, Artificial Sequence
  synthetic sequence
gccccgttacatt

SEQ ID NO: 7108 - DNA, 13 bp, Artificial Sequence
  synthetic sequence
ctccacaaaggct

SEQ ID NO: 7109 - DNA, 13 bp, Artificial Sequence
  synthetic sequence
cgcaagaaccctt

SEQ ID NO: 7110 - DNA, 13 bp, Artificial Sequence
  synthetic sequence
tcatcccctactt

SEQ ID NO: 7111 - DNA, 13 bp, Artificial Sequence
  synthetic sequence
gggaactccgcat

SEQ ID NO: 7112 - DNA, 13 bp, Artificial Sequence
  synthetic sequence
ccttagcacccat

SEQ ID NO: 7113 - DNA, 13 bp, Artificial Sequence
  synthetic sequence
tcaatccaataag

SEQ ID NO: 7114 - DNA, 13 bp, Artificial Sequence
  synthetic sequence
ttgtgccacctgc

SEQ ID NO: 7115 - DNA, 13 bp, Artificial Sequence
  synthetic sequence
gctaccccctagc

SEQ ID NO: 7116 - DNA, 13 bp, Artificial Sequence
  synthetic sequence
tagtaccagttag

SEQ ID NO: 7117 - DNA, 13 bp, Artificial Sequence
  synthetic sequence
cgactaaccctgc

SEQ ID NO: 7118 - DNA, 13 bp, Artificial Sequence
  synthetic sequence
ctgttatgctata

SEQ ID NO: 7119 - DNA, 13 bp, Artificial Sequence
  synthetic sequence
ctaacaaaatgaa

SEQ ID NO: 7120 - DNA, 13 bp, Artificial Sequence
  synthetic sequence
ccagattgacgac

SEQ ID NO: 7121 - DNA, 13 bp, Artificial Sequence
  synthetic sequence
cggtggcaggaat

SEQ ID NO: 7122 - DNA, 13 bp, Artificial Sequence
  synthetic sequence
gggactgggtatt

SEQ ID NO: 7123 - DNA, 13 bp, Artificial Sequence
  synthetic sequence
gcgggtacttctt

SEQ ID NO: 7124 - DNA, 13 bp, Artificial Sequence
  synthetic sequence
agggcaagtgggc

SEQ ID NO: 7125 - DNA, 13 bp, Artificial Sequence
  synthetic sequence
agcagacacagcc

SEQ ID NO: 7126 - DNA, 13 bp, Artificial Sequence
  synthetic sequence
aggtgagatctct

SEQ ID NO: 7127 - DNA, 13 bp, Artificial Sequence
  synthetic sequence
agagcaagcacgc

SEQ ID NO: 7128 - DNA, 13 bp, Artificial Sequence
  synthetic sequence
ccccagacactac

SEQ ID NO: 7129 - DNA, 13 bp, Artificial Sequence
  synthetic sequence
tcatgatggagaa

SEQ ID NO: 7130 - DNA, 13 bp, Artificial Sequence
  synthetic sequence
agaacccctccat

SEQ ID NO: 7131 - DNA, 13 bp, Artificial Sequence
  synthetic sequence
agaacgcagtggc

SEQ ID NO: 7132 - DNA, 13 bp, Artificial Sequence
  synthetic sequence
tcctttgttatta

SEQ ID NO: 7133 - DNA, 13 bp, Artificial Sequence
  synthetic sequence
tcttcagggcctt

SEQ ID NO: 7134 - DNA, 13 bp, Artificial Sequence
  synthetic sequence
gagctagagagtg

SEQ ID NO: 7135 - DNA, 13 bp, Artificial Sequence
  synthetic sequence
tgcctaaggagaa

SEQ ID NO: 7136 - DNA, 13 bp, Artificial Sequence
  synthetic sequence
tagttgcatatga

SEQ ID NO: 7137 - DNA, 13 bp, Artificial Sequence
  synthetic sequence
aaggtaatcgtcc

SEQ ID NO: 7138 - DNA, 13 bp, Artificial Sequence
  synthetic sequence
agcatgtattcac

SEQ ID NO: 7139 - DNA, 13 bp, Artificial Sequence
  synthetic sequence
ctggctcaaccac

SEQ ID NO: 7140 - DNA, 13 bp, Artificial Sequence
  synthetic sequence
cacaagcttaggc

SEQ ID NO: 7141 - DNA, 13 bp, Artificial Sequence
  synthetic sequence
aatcggtacactg

SEQ ID NO: 7142 - DNA, 13 bp, Artificial Sequence
  synthetic sequence
agtgatatgtgct

SEQ ID NO: 7143 - DNA, 13 bp, Artificial Sequence
  synthetic sequence
atatgaaccccca

SEQ ID NO: 7144 - DNA, 13 bp, Artificial Sequence
  synthetic sequence
aggagtttgaggc

SEQ ID NO: 7145 - DNA, 13 bp, Artificial Sequence
  synthetic sequence
agtgcaagttgta

SEQ ID NO: 7146 - DNA, 13 bp, Artificial Sequence
  synthetic sequence
caacaatgatgcc

SEQ ID NO: 7147 - DNA, 13 bp, Artificial Sequence
  synthetic sequence
tatactcctctgt

SEQ ID NO: 7148 - DNA, 13 bp, Artificial Sequence
  synthetic sequence
atagcaccctatc

SEQ ID NO: 7149 - DNA, 13 bp, Artificial Sequence
  synthetic sequence
gcatgatcgaggc

SEQ ID NO: 7150 - DNA, 13 bp, Artificial Sequence
  synthetic sequence
aaggcttgggaat

SEQ ID NO: 7151 - DNA, 13 bp, Artificial Sequence
  synthetic sequence
tgcctcgtgaatc

SEQ ID NO: 7152 - DNA, 13 bp, Artificial Sequence
  synthetic sequence
caagcatgctaga

SEQ ID NO: 7153 - DNA, 13 bp, Artificial Sequence
  synthetic sequence
cgtgatctcaccg

SEQ ID NO: 7154 - DNA, 13 bp, Artificial Sequence
  synthetic sequence
gttgagctgcctc

SEQ ID NO: 7155 - DNA, 13 bp, Artificial Sequence
  synthetic sequence
acaatgccgtttg

SEQ ID NO: 7156 - DNA, 13 bp, Artificial Sequence
  synthetic sequence
ttcatcaacccgg

SEQ ID NO: 7157 - DNA, 13 bp, Artificial Sequence
  synthetic sequence
cgcgcatttatcc

SEQ ID NO: 7158 - DNA, 13 bp, Artificial Sequence
  synthetic sequence
gcttaagcgggtc

SEQ ID NO: 7159 - DNA, 13 bp, Artificial Sequence
  synthetic sequence
caagactcagccc

SEQ ID NO: 7160 - DNA, 13 bp, Artificial Sequence
  synthetic sequence
cgccgttgctctc

SEQ ID NO: 7161 - DNA, 13 bp, Artificial Sequence
  synthetic sequence
gacagctcagcgg

SEQ ID NO: 7162 - DNA, 13 bp, Artificial Sequence
  synthetic sequence
gcggttgggacta

SEQ ID NO: 7163 - DNA, 13 bp, Artificial Sequence
  synthetic sequence
gtcgtgaacaaaa

SEQ ID NO: 7164 - DNA, 13 bp, Artificial Sequence
  synthetic sequence
ccctgagcagata

SEQ ID NO: 7165 - DNA, 13 bp, Artificial Sequence
  synthetic sequence
tctgccgatgctc

SEQ ID NO: 7166 - DNA, 13 bp, Artificial Sequence
  synthetic sequence
ccagtgtcttttt

SEQ ID NO: 7167 - DNA, 13 bp, Artificial Sequence
  synthetic sequence
tcaatcaatgtga

SEQ ID NO: 7168 - DNA, 13 bp, Artificial Sequence
  synthetic sequence
ctatactcaaagt

SEQ ID NO: 7169 - DNA, 13 bp, Artificial Sequence
  synthetic sequence
agtcaagggctgc

SEQ ID NO: 7170 - DNA, 13 bp, Artificial Sequence
  synthetic sequence
agccgagcagatc

SEQ ID NO: 7171 - DNA, 13 bp, Artificial Sequence
  synthetic sequence
tcaggaggtggat

SEQ ID NO: 7172 - DNA, 13 bp, Artificial Sequence
  synthetic sequence
ctcctcctcatgg

SEQ ID NO: 7173 - DNA, 13 bp, Artificial Sequence
  synthetic sequence
gttgtattgcccc

SEQ ID NO: 7174 - DNA, 13 bp, Artificial Sequence
  synthetic sequence
ccaggtaaagaat

SEQ ID NO: 7175 - DNA, 13 bp, Artificial Sequence
  synthetic sequence
agataattgctct

SEQ ID NO: 7176 - DNA, 13 bp, Artificial Sequence
  synthetic sequence
caccatctgacta

SEQ ID NO: 7177 - DNA, 13 bp, Artificial Sequence
  synthetic sequence
gaaggttgtcatt

SEQ ID NO: 7178 - DNA, 13 bp, Artificial Sequence
  synthetic sequence
tggtgtacctgtc

SEQ ID NO: 7179 - DNA, 13 bp, Artificial Sequence
  synthetic sequence
ttgttatggggag

SEQ ID NO: 7180 - DNA, 13 bp, Artificial Sequence
  synthetic sequence
acgggagcagctc

SEQ ID NO: 7181 - DNA, 13 bp, Artificial Sequence
  synthetic sequence
tttcagtgaaaga

SEQ ID NO: 7182 - DNA, 13 bp, Artificial Sequence
  synthetic sequence
tgcgaggttagtt

SEQ ID NO: 7183 - DNA, 13 bp, Artificial Sequence
  synthetic sequence
cctccggctgaca

SEQ ID NO: 7184 - DNA, 13 bp, Artificial Sequence
  synthetic sequence
agggacctacttg

SEQ ID NO: 7185 - DNA, 13 bp, Artificial Sequence
  synthetic sequence
atagatctatttc

SEQ ID NO: 7186 - DNA, 13 bp, Artificial Sequence
  synthetic sequence
ttccatacaccag

SEQ ID NO: 7187 - DNA, 13 bp, Artificial Sequence
  synthetic sequence
tccctttcttggt

SEQ ID NO: 7188 - DNA, 13 bp, Artificial Sequence
  synthetic sequence
cgttcatggcgtg

SEQ ID NO: 7189 - DNA, 13 bp, Artificial Sequence
  synthetic sequence
atggatctgtaca

SEQ ID NO: 7190 - DNA, 13 bp, Artificial Sequence
  synthetic sequence
ctggagattcctt

SEQ ID NO: 7191 - DNA, 13 bp, Artificial Sequence
  synthetic sequence
ccacacttgaaca

SEQ ID NO: 7192 - DNA, 13 bp, Artificial Sequence
  synthetic sequence
ttacttgagatgg

SEQ ID NO: 7193 - DNA, 13 bp, Artificial Sequence
  synthetic sequence
cgggcctccacca

SEQ ID NO: 7194 - DNA, 13 bp, Artificial Sequence
  synthetic sequence
atgcgaagtggcc

SEQ ID NO: 7195 - DNA, 13 bp, Artificial Sequence
  synthetic sequence
aatccacatgagg

SEQ ID NO: 7196 - DNA, 13 bp, Artificial Sequence
  synthetic sequence
cagcccgtcctag

SEQ ID NO: 7197 - DNA, 13 bp, Artificial Sequence
  synthetic sequence
ggttatgccatac

SEQ ID NO: 7198 - DNA, 13 bp, Artificial Sequence
  synthetic sequence
accccgacgctat

SEQ ID NO: 7199 - DNA, 13 bp, Artificial Sequence
  synthetic sequence
ggtctgttagaca

SEQ ID NO: 7200 - DNA, 13 bp, Artificial Sequence
  synthetic sequence
ttgtgaatgctct

SEQ ID NO: 7201 - DNA, 13 bp, Artificial Sequence
  synthetic sequence
tcactcccccatc

SEQ ID NO: 7202 - DNA, 13 bp, Artificial Sequence
  synthetic sequence
atggacctcatta

SEQ ID NO: 7203 - DNA, 13 bp, Artificial Sequence
  synthetic sequence
ctggtccaggtgt

SEQ ID NO: 7204 - DNA, 13 bp, Artificial Sequence
  synthetic sequence
gttggtggttgat

SEQ ID NO: 7205 - DNA, 13 bp, Artificial Sequence
  synthetic sequence
tcactgtaggggg

SEQ ID NO: 7206 - DNA, 13 bp, Artificial Sequence
  synthetic sequence
gccaagggctcac

SEQ ID NO: 7207 - DNA, 13 bp, Artificial Sequence
  synthetic sequence
cacggcaggggct

SEQ ID NO: 7208 - DNA, 13 bp, Artificial Sequence
  synthetic sequence
gccacctactacc

SEQ ID NO: 7209 - DNA, 13 bp, Artificial Sequence
  synthetic sequence
ccctctgctgcca

SEQ ID NO: 7210 - DNA, 13 bp, Artificial Sequence
  synthetic sequence
gctggaatcagcc

SEQ ID NO: 7211 - DNA, 13 bp, Artificial Sequence
  synthetic sequence
ttgttgctcttcg

SEQ ID NO: 7212 - DNA, 13 bp, Artificial Sequence
  synthetic sequence
ctaacaaaatgaa

SEQ ID NO: 7213 - DNA, 13 bp, Artificial Sequence
  synthetic sequence
ccagattgacgac

SEQ ID NO: 7214 - DNA, 13 bp, Artificial Sequence
  synthetic sequence
cggtggcaggaat

SEQ ID NO: 7215 - DNA, 13 bp, Artificial Sequence
  synthetic sequence
gggactgggtatt

SEQ ID NO: 7216 - DNA, 13 bp, Artificial Sequence
  synthetic sequence
gcgggtacttctt

SEQ ID NO: 7217 - DNA, 13 bp, Artificial Sequence
  synthetic sequence
agggcaagtgggc

SEQ ID NO: 7218 - DNA, 13 bp, Artificial Sequence
  synthetic sequence
agcagacacagcc

SEQ ID NO: 7219 - DNA, 13 bp, Artificial Sequence
  synthetic sequence
aggtgagatctct

SEQ ID NO: 7220 - DNA, 13 bp, Artificial Sequence
  synthetic sequence
agagcaagcacgc

SEQ ID NO: 7221 - DNA, 13 bp, Artificial Sequence
  synthetic sequence
ccccagacactac

SEQ ID NO: 7222 - DNA, 13 bp, Artificial Sequence
  synthetic sequence
tcatgatggagaa

SEQ ID NO: 7223 - DNA, 13 bp, Artificial Sequence
  synthetic sequence
agaacccctccat

SEQ ID NO: 7224 - DNA, 13 bp, Artificial Sequence
  synthetic sequence
agaacgcagtggc

SEQ ID NO: 7225 - DNA, 13 bp, Artificial Sequence
  synthetic sequence
tcctttgttatta

SEQ ID NO: 7226 - DNA, 13 bp, Artificial Sequence
  synthetic sequence
tcttcagggcctt

SEQ ID NO: 7227 - DNA, 13 bp, Artificial Sequence
  synthetic sequence
gagctagagagtg

SEQ ID NO: 7228 - DNA, 13 bp, Artificial Sequence
  synthetic sequence
tgcctaaggagaa

SEQ ID NO: 7229 - DNA, 13 bp, Artificial Sequence
  synthetic sequence
tagttgcatatga

SEQ ID NO: 7230 - DNA, 13 bp, Artificial Sequence
  synthetic sequence
aaggtaatcgtcc

SEQ ID NO: 7231 - DNA, 13 bp, Artificial Sequence
  synthetic sequence
agcatgtattcac

SEQ ID NO: 7232 - DNA, 13 bp, Artificial Sequence
  synthetic sequence
ctggctcaaccac

SEQ ID NO: 7233 - DNA, 13 bp, Artificial Sequence
  synthetic sequence
cacaagcttaggc

SEQ ID NO: 7234 - DNA, 13 bp, Artificial Sequence
  synthetic sequence
aatcggtacactg

SEQ ID NO: 7235 - DNA, 13 bp, Artificial Sequence
  synthetic sequence
agtgatatgtgct

SEQ ID NO: 7236 - DNA, 13 bp, Artificial Sequence
  synthetic sequence
atatgaaccccca

SEQ ID NO: 7237 - DNA, 13 bp, Artificial Sequence
  synthetic sequence
aggagtttgaggc

SEQ ID NO: 7238 - DNA, 13 bp, Artificial Sequence
  synthetic sequence
agtgcaagttgta

SEQ ID NO: 7239 - DNA, 13 bp, Artificial Sequence
  synthetic sequence
caacaatgatgcc

SEQ ID NO: 7240 - DNA, 13 bp, Artificial Sequence
  synthetic sequence
tatactcctctgt

SEQ ID NO: 7241 - DNA, 13 bp, Artificial Sequence
  synthetic sequence
atagcaccctatc

SEQ ID NO: 7242 - DNA, 13 bp, Artificial Sequence
  synthetic sequence
gcatgatcgaggc

SEQ ID NO: 7243 - DNA, 13 bp, Artificial Sequence
  synthetic sequence
aaggcttgggaat

SEQ ID NO: 7244 - DNA, 13 bp, Artificial Sequence
  synthetic sequence
tgcctcgtgaatc

SEQ ID NO: 7245 - DNA, 13 bp, Artificial Sequence
  synthetic sequence
caagcatgctaga

SEQ ID NO: 7246 - DNA, 13 bp, Artificial Sequence
  synthetic sequence
cgtgatctcaccg

SEQ ID NO: 7247 - DNA, 13 bp, Artificial Sequence
  synthetic sequence
gttgagctgcctc

SEQ ID NO: 7248 - DNA, 13 bp, Artificial Sequence
  synthetic sequence
acaatgccgtttg

SEQ ID NO: 7249 - DNA, 13 bp, Artificial Sequence
  synthetic sequence
ttcatcaacccgg

SEQ ID NO: 7250 - DNA, 13 bp, Artificial Sequence
  synthetic sequence
cgcgcatttatcc

SEQ ID NO: 7251 - DNA, 13 bp, Artificial Sequence
  synthetic sequence
gcttaagcgggtc

SEQ ID NO: 7252 - DNA, 13 bp, Artificial Sequence
  synthetic sequence
caagactcagccc

SEQ ID NO: 7253 - DNA, 13 bp, Artificial Sequence
  synthetic sequence
cgccgttgctctc

SEQ ID NO: 7254 - DNA, 13 bp, Artificial Sequence
  synthetic sequence
gacagctcagcgg

SEQ ID NO: 7255 - DNA, 13 bp, Artificial Sequence
  synthetic sequence
gcggttgggacta

SEQ ID NO: 7256 - DNA, 13 bp, Artificial Sequence
  synthetic sequence
gtcgtgaacaaaa

SEQ ID NO: 7257 - DNA, 13 bp, Artificial Sequence
  synthetic sequence
ccctgagcagata

SEQ ID NO: 7258 - DNA, 13 bp, Artificial Sequence
  synthetic sequence
tctgccgatgctc

SEQ ID NO: 7259 - DNA, 13 bp, Artificial Sequence
  synthetic sequence
ccagtgtcttttt

SEQ ID NO: 7260 - DNA, 13 bp, Artificial Sequence
  synthetic sequence
tcaatcaatgtga

SEQ ID NO: 7261 - DNA, 13 bp, Artificial Sequence
  synthetic sequence
ctatactcaaagt

SEQ ID NO: 7262 - DNA, 13 bp, Artificial Sequence
  synthetic sequence
agtcaagggctgc

SEQ ID NO: 7263 - DNA, 13 bp, Artificial Sequence
  synthetic sequence
agccgagcagatc

SEQ ID NO: 7264 - DNA, 13 bp, Artificial Sequence
  synthetic sequence
tcaggaggtggat

SEQ ID NO: 7265 - DNA, 13 bp, Artificial Sequence
  synthetic sequence
ctcctcctcatgg

SEQ ID NO: 7266 - DNA, 13 bp, Artificial Sequence
  synthetic sequence
gttgtattgcccc

SEQ ID NO: 7267 - DNA, 13 bp, Artificial Sequence
  synthetic sequence
ccaggtaaagaat

SEQ ID NO: 7268 - DNA, 13 bp, Artificial Sequence
  synthetic sequence
agataattgctct

SEQ ID NO: 7269 - DNA, 13 bp, Artificial Sequence
  synthetic sequence
caccatctgacta

SEQ ID NO: 7270 - DNA, 13 bp, Artificial Sequence
  synthetic sequence
gaaggttgtcatt

SEQ ID NO: 7271 - DNA, 13 bp, Artificial Sequence
  synthetic sequence
tggtgtacctgtc

SEQ ID NO: 7272 - DNA, 13 bp, Artificial Sequence
  synthetic sequence
ttgttatggggag

SEQ ID NO: 7273 - DNA, 13 bp, Artificial Sequence
  synthetic sequence
acgggagcagctc

SEQ ID NO: 7274 - DNA, 13 bp, Artificial Sequence
  synthetic sequence
tttcagtgaaaga

SEQ ID NO: 7275 - DNA, 13 bp, Artificial Sequence
  synthetic sequence
tgcgaggttagtt

SEQ ID NO: 7276 - DNA, 13 bp, Artificial Sequence
  synthetic sequence
cctccggctgaca

SEQ ID NO: 7277 - DNA, 13 bp, Artificial Sequence
  synthetic sequence
agggacctacttg

SEQ ID NO: 7278 - DNA, 13 bp, Artificial Sequence
  synthetic sequence
atagatctatttc

SEQ ID NO: 7279 - DNA, 13 bp, Artificial Sequence
  synthetic sequence
ttccatacaccag

SEQ ID NO: 7280 - DNA, 13 bp, Artificial Sequence
  synthetic sequence
tccctttcttggt

SEQ ID NO: 7281 - DNA, 13 bp, Artificial Sequence
  synthetic sequence
cgttcatggcgtg

SEQ ID NO: 7282 - DNA, 13 bp, Artificial Sequence
  synthetic sequence
atggatctgtaca

SEQ ID NO: 7283 - DNA, 13 bp, Artificial Sequence
  synthetic sequence
ctggagattcctt

SEQ ID NO: 7284 - DNA, 13 bp, Artificial Sequence
  synthetic sequence
ccacacttgaaca

SEQ ID NO: 7285 - DNA, 13 bp, Artificial Sequence
  synthetic sequence
ttacttgagatgg

SEQ ID NO: 7286 - DNA, 13 bp, Artificial Sequence
  synthetic sequence
cgggcctccacca

SEQ ID NO: 7287 - DNA, 13 bp, Artificial Sequence
  synthetic sequence
atgcgaagtggcc

SEQ ID NO: 7288 - DNA, 13 bp, Artificial Sequence
  synthetic sequence
aatccacatgagg

SEQ ID NO: 7289 - DNA, 13 bp, Artificial Sequence
  synthetic sequence
cagcccgtcctag

SEQ ID NO: 7290 - DNA, 13 bp, Artificial Sequence
  synthetic sequence
ggttatgccatac

SEQ ID NO: 7291 - DNA, 13 bp, Artificial Sequence
  synthetic sequence
accccgacgctat

SEQ ID NO: 7292 - DNA, 13 bp, Artificial Sequence
  synthetic sequence
ggtctgttagaca

SEQ ID NO: 7293 - DNA, 13 bp, Artificial Sequence
  synthetic sequence
ttgtgaatgctct

SEQ ID NO: 7294 - DNA, 13 bp, Artificial Sequence
  synthetic sequence
tcactcccccatc

SEQ ID NO: 7295 - DNA, 13 bp, Artificial Sequence
  synthetic sequence
atggacctcatta

SEQ ID NO: 7296 - DNA, 13 bp, Artificial Sequence
  synthetic sequence
ctggtccaggtgt

SEQ ID NO: 7297 - DNA, 13 bp, Artificial Sequence
  synthetic sequence
gttggtggttgat

SEQ ID NO: 7298 - DNA, 13 bp, Artificial Sequence
  synthetic sequence
tcactgtaggggg

SEQ ID NO: 7299 - DNA, 13 bp, Artificial Sequence
  synthetic sequence
gccaagggctcac

SEQ ID NO: 7300 - DNA, 13 bp, Artificial Sequence
  synthetic sequence
cacggcaggggct

SEQ ID NO: 7301 - DNA, 13 bp, Artificial Sequence
  synthetic sequence
gccacctactacc

SEQ ID NO: 7302 - DNA, 13 bp, Artificial Sequence
  synthetic sequence
ccctctgctgcca

SEQ ID NO: 7303 - DNA, 13 bp, Artificial Sequence
  synthetic sequence
gctggaatcagcc

SEQ ID NO: 7304 - DNA, 13 bp, Artificial Sequence
  synthetic sequence
ttgttgctcttcg

SEQ ID NO: 7305 - DNA, 13 bp, Artificial Sequence
  synthetic sequence
aagcaacaaccaa

SEQ ID NO: 7306 - DNA, 13 bp, Artificial Sequence
  synthetic sequence
agtggtacttgag

SEQ ID NO: 7307 - DNA, 13 bp, Artificial Sequence
  synthetic sequence
ttgtgaagtaatc

SEQ ID NO: 7308 - DNA, 13 bp, Artificial Sequence
  synthetic sequence
ctgtctcatgacc

SEQ ID NO: 7309 - DNA, 13 bp, Artificial Sequence
  synthetic sequence
tatcttgatgttc

SEQ ID NO: 7310 - DNA, 13 bp, Artificial Sequence
  synthetic sequence
gagatatctcgcg

SEQ ID NO: 7311 - DNA, 13 bp, Artificial Sequence
  synthetic sequence
gtatgatgtccca

SEQ ID NO: 7312 - DNA, 13 bp, Artificial Sequence
  synthetic sequence
gcatcagtgtggg

SEQ ID NO: 7313 - DNA, 13 bp, Artificial Sequence
  synthetic sequence
gcgaggtactcct

SEQ ID NO: 7314 - DNA, 13 bp, Artificial Sequence
  synthetic sequence
gttgccattgagc

SEQ ID NO: 7315 - DNA, 13 bp, Artificial Sequence
  synthetic sequence
cagtctcaccatg

SEQ ID NO: 7316 - DNA, 13 bp, Artificial Sequence
  synthetic sequence
agctgctcccttc

SEQ ID NO: 7317 - DNA, 13 bp, Artificial Sequence
  synthetic sequence
cctcatcattcag

SEQ ID NO: 7318 - DNA, 13 bp, Artificial Sequence
  synthetic sequence
actggaggatctc

SEQ ID NO: 7319 - DNA, 13 bp, Artificial Sequence
  synthetic sequence
atgttccgaagcc

SEQ ID NO: 7320 - DNA, 13 bp, Artificial Sequence
  synthetic sequence
agtgagttgagtg

SEQ ID NO: 7321 - DNA, 13 bp, Artificial Sequence
  synthetic sequence
atggctctagcag

SEQ ID NO: 7322 - DNA, 13 bp, Artificial Sequence
  synthetic sequence
gcattaaactcta

SEQ ID NO: 7323 - DNA, 13 bp, Artificial Sequence
  synthetic sequence
ccttcttactcca

SEQ ID NO: 7324 - DNA, 13 bp, Artificial Sequence
  synthetic sequence
gaaggaaactatc

SEQ ID NO: 7325 - DNA, 13 bp, Artificial Sequence
  synthetic sequence
gccgagcactagg

SEQ ID NO: 7326 - DNA, 13 bp, Artificial Sequence
  synthetic sequence
atgtgcacccagc

SEQ ID NO: 7327 - DNA, 13 bp, Artificial Sequence
  synthetic sequence
ggttgggtcaatg

SEQ ID NO: 7328 - DNA, 13 bp, Artificial Sequence
  synthetic sequence
caatgagaatccc

SEQ ID NO: 7329 - DNA, 13 bp, Artificial Sequence
  synthetic sequence
gtccatagtttct

SEQ ID NO: 7330 - DNA, 13 bp, Artificial Sequence
  synthetic sequence
atactataactgt

SEQ ID NO: 7331 - DNA, 13 bp, Artificial Sequence
  synthetic sequence
gcaaacatagaaa

SEQ ID NO: 7332 - DNA, 13 bp, Artificial Sequence
  synthetic sequence
gagggtcccaccc

SEQ ID NO: 7333 - DNA, 13 bp, Artificial Sequence
  synthetic sequence
aatatcgttgaag

SEQ ID NO: 7334 - DNA, 13 bp, Artificial Sequence
  synthetic sequence
accactgaggcga

SEQ ID NO: 7335 - DNA, 13 bp, Artificial Sequence
  synthetic sequence
tgattgccaatgt

SEQ ID NO: 7336 - DNA, 13 bp, Artificial Sequence
  synthetic sequence
acatgaacggtgg

SEQ ID NO: 7337 - DNA, 13 bp, Artificial Sequence
  synthetic sequence
cctacgccgcctt

SEQ ID NO: 7338 - DNA, 13 bp, Artificial Sequence
  synthetic sequence
tgaataataaacg

SEQ ID NO: 7339 - DNA, 13 bp, Artificial Sequence
  synthetic sequence
gatggcattgcca

SEQ ID NO: 7340 - DNA, 13 bp, Artificial Sequence
  synthetic sequence
ggcttgcagattt

SEQ ID NO: 7341 - DNA, 13 bp, Artificial Sequence
  synthetic sequence
ggttgatgcgtag

SEQ ID NO: 7342 - DNA, 13 bp, Artificial Sequence
  synthetic sequence
gaacgactgtaag

SEQ ID NO: 7343 - DNA, 13 bp, Artificial Sequence
  synthetic sequence
aatgagcaacaat

SEQ ID NO: 7344 - DNA, 13 bp, Artificial Sequence
  synthetic sequence
acttgctattaat

SEQ ID NO: 7345 - DNA, 13 bp, Artificial Sequence
  synthetic sequence
ccgaatcagcata

SEQ ID NO: 7346 - DNA, 13 bp, Artificial Sequence
  synthetic sequence
tctgcatgtccga

SEQ ID NO: 7347 - DNA, 13 bp, Artificial Sequence
  synthetic sequence
agctctctcgcat

SEQ ID NO: 7348 - DNA, 13 bp, Artificial Sequence
  synthetic sequence
tacggggtataag

SEQ ID NO: 7349 - DNA, 13 bp, Artificial Sequence
  synthetic sequence
ccttataccttac

SEQ ID NO: 7350 - DNA, 13 bp, Artificial Sequence
  synthetic sequence
gacagacacctgt

SEQ ID NO: 7351 - DNA, 13 bp, Artificial Sequence
  synthetic sequence
tctatggtggcaa

SEQ ID NO: 7352 - DNA, 13 bp, Artificial Sequence
  synthetic sequence
tcacccctgtcgt

SEQ ID NO: 7353 - DNA, 13 bp, Artificial Sequence
  synthetic sequence
caccaatggatgg

SEQ ID NO: 7354 - DNA, 13 bp, Artificial Sequence
  synthetic sequence
gtaccgaatcctc

SEQ ID NO: 7355 - DNA, 13 bp, Artificial Sequence
  synthetic sequence
gtagagacaacac

SEQ ID NO: 7356 - DNA, 13 bp, Artificial Sequence
  synthetic sequence
ctgcaaggtaagt

SEQ ID NO: 7357 - DNA, 13 bp, Artificial Sequence
  synthetic sequence
tttcctcaacaaa

SEQ ID NO: 7358 - DNA, 13 bp, Artificial Sequence
  synthetic sequence
gacttctgcaccg

SEQ ID NO: 7359 - DNA, 13 bp, Artificial Sequence
  synthetic sequence
cacaaagacttat

SEQ ID NO: 7360 - DNA, 13 bp, Artificial Sequence
  synthetic sequence
atatacaggacac

SEQ ID NO: 7361 - DNA, 13 bp, Artificial Sequence
  synthetic sequence
ccttctcaaactg

SEQ ID NO: 7362 - DNA, 13 bp, Artificial Sequence
  synthetic sequence
agctcaagttggg

SEQ ID NO: 7363 - DNA, 13 bp, Artificial Sequence
  synthetic sequence
tcttccaaaaggc

SEQ ID NO: 7364 - DNA, 13 bp, Artificial Sequence
  synthetic sequence
ggaagcccaacca

SEQ ID NO: 7365 - DNA, 13 bp, Artificial Sequence
  synthetic sequence
tgacattttccgt

SEQ ID NO: 7366 - DNA, 13 bp, Artificial Sequence
  synthetic sequence
tgtgatagccggt

SEQ ID NO: 7367 - DNA, 13 bp, Artificial Sequence
  synthetic sequence
acttcttctcgcg

SEQ ID NO: 7368 - DNA, 13 bp, Artificial Sequence
  synthetic sequence
gcaagtaatagtc

SEQ ID NO: 7369 - DNA, 13 bp, Artificial Sequence
  synthetic sequence
gctttgctgaaac

SEQ ID NO: 7370 - DNA, 13 bp, Artificial Sequence
  synthetic sequence
agttgcactcgaa

SEQ ID NO: 7371 - DNA, 13 bp, Artificial Sequence
  synthetic sequence
gagggtttttaag

SEQ ID NO: 7372 - DNA, 13 bp, Artificial Sequence
  synthetic sequence
aaccctgcctcga

SEQ ID NO: 7373 - DNA, 13 bp, Artificial Sequence
  synthetic sequence
taagatctgctga

SEQ ID NO: 7374 - DNA, 13 bp, Artificial Sequence
  synthetic sequence
atgcgacatttga

SEQ ID NO: 7375 - DNA, 13 bp, Artificial Sequence
  synthetic sequence
acggtgtattgta

SEQ ID NO: 7376 - DNA, 13 bp, Artificial Sequence
  synthetic sequence
cgagtgtgagctt

SEQ ID NO: 7377 - DNA, 13 bp, Artificial Sequence
  synthetic sequence
tccaactgacgac

SEQ ID NO: 7378 - DNA, 13 bp, Artificial Sequence
  synthetic sequence
gggtcagtcacta

SEQ ID NO: 7379 - DNA, 13 bp, Artificial Sequence
  synthetic sequence
accccctgtgcgt

SEQ ID NO: 7380 - DNA, 13 bp, Artificial Sequence
  synthetic sequence
gttatggccagct

SEQ ID NO: 7381 - DNA, 13 bp, Artificial Sequence
  synthetic sequence
agttgatcctagg

SEQ ID NO: 7382 - DNA, 13 bp, Artificial Sequence
  synthetic sequence
agagctgcttcaa

SEQ ID NO: 7383 - DNA, 13 bp, Artificial Sequence
  synthetic sequence
aaatattgacagg

SEQ ID NO: 7384 - DNA, 13 bp, Artificial Sequence
  synthetic sequence
tcgagaaagagtg

SEQ ID NO: 7385 - DNA, 13 bp, Artificial Sequence
  synthetic sequence
cagccactcagca

SEQ ID NO: 7386 - DNA, 13 bp, Artificial Sequence
  synthetic sequence
acaggcgtcgaca

SEQ ID NO: 7387 - DNA, 13 bp, Artificial Sequence
  synthetic sequence
acgagagtgtcct

SEQ ID NO: 7388 - DNA, 13 bp, Artificial Sequence
  synthetic sequence
gtaaatacggacg

SEQ ID NO: 7389 - DNA, 13 bp, Artificial Sequence
  synthetic sequence
cctcaaggtgagg

SEQ ID NO: 7390 - DNA, 13 bp, Artificial Sequence
  synthetic sequence
tcgaggtagagtt

SEQ ID NO: 7391 - DNA, 13 bp, Artificial Sequence
  synthetic sequence
gctcatcaaattc

SEQ ID NO: 7392 - DNA, 13 bp, Artificial Sequence
  synthetic sequence
tgcacccgcagaa

SEQ ID NO: 7393 - DNA, 13 bp, Artificial Sequence
  synthetic sequence
atcacaggcatat

SEQ ID NO: 7394 - DNA, 13 bp, Artificial Sequence
  synthetic sequence
gcaaatacggacg

SEQ ID NO: 7395 - DNA, 13 bp, Artificial Sequence
  synthetic sequence
agaacgagagtgt

SEQ ID NO: 7396 - DNA, 13 bp, Artificial Sequence
  synthetic sequence
agcggtgtgtaag

SEQ ID NO: 7397 - DNA, 13 bp, Artificial Sequence
  synthetic sequence
ttattagatagag

SEQ ID NO: 7398 - DNA, 13 bp, Artificial Sequence
  synthetic sequence
tttgcgagatggc

SEQ ID NO: 7399 - DNA, 13 bp, Artificial Sequence
  synthetic sequence
acgtggattgcag

SEQ ID NO: 7400 - DNA, 13 bp, Artificial Sequence
  synthetic sequence
cgatcaggcgctg

SEQ ID NO: 7401 - DNA, 13 bp, Artificial Sequence
  synthetic sequence
ttttacaacaact

SEQ ID NO: 7402 - DNA, 13 bp, Artificial Sequence
  synthetic sequence
ttgaaatttcagg

SEQ ID NO: 7403 - DNA, 13 bp, Artificial Sequence
  synthetic sequence
atcctgggtgtcg

SEQ ID NO: 7404 - DNA, 13 bp, Artificial Sequence
  synthetic sequence
acctggagcggaa

SEQ ID NO: 7405 - DNA, 13 bp, Artificial Sequence
  synthetic sequence
gtttgttttccga

SEQ ID NO: 7406 - DNA, 13 bp, Artificial Sequence
  synthetic sequence
atcctcaagattt

SEQ ID NO: 7407 - DNA, 13 bp, Artificial Sequence
  synthetic sequence
ctagagatgatgg

SEQ ID NO: 7408 - DNA, 13 bp, Artificial Sequence
  synthetic sequence
tacggagttggga

SEQ ID NO: 7409 - DNA, 13 bp, Artificial Sequence
  synthetic sequence
gtgggcttgcagt

SEQ ID NO: 7410 - DNA, 13 bp, Artificial Sequence
  synthetic sequence
ttatgtatgccct

SEQ ID NO: 7411 - DNA, 13 bp, Artificial Sequence
  synthetic sequence
tcagattgtgttc

SEQ ID NO: 7412 - DNA, 13 bp, Artificial Sequence
  synthetic sequence
gattccttcgaac

SEQ ID NO: 7413 - DNA, 13 bp, Artificial Sequence
  synthetic sequence
tttatccagtcat

SEQ ID NO: 7414 - DNA, 13 bp, Artificial Sequence
  synthetic sequence
catctctatcttt

SEQ ID NO: 7415 - DNA, 13 bp, Artificial Sequence
  synthetic sequence
agatggctgcaag

SEQ ID NO: 7416 - DNA, 13 bp, Artificial Sequence
  synthetic sequence
tattgtgagatga

SEQ ID NO: 7417 - DNA, 13 bp, Artificial Sequence
  synthetic sequence
aagaagttatttt

SEQ ID NO: 7418 - DNA, 13 bp, Artificial Sequence
  synthetic sequence
aatagcaagtaat

SEQ ID NO: 7419 - DNA, 13 bp, Artificial Sequence
  synthetic sequence
tgtcattaaggcg

SEQ ID NO: 7420 - DNA, 13 bp, Artificial Sequence
  synthetic sequence
tttactgatggtt

SEQ ID NO: 7421 - DNA, 13 bp, Artificial Sequence
  synthetic sequence
gtattgcacaatg

SEQ ID NO: 7422 - DNA, 13 bp, Artificial Sequence
  synthetic sequence
gcggccaaccatt

SEQ ID NO: 7423 - DNA, 13 bp, Artificial Sequence
  synthetic sequence
aagggagtgcttg

SEQ ID NO: 7424 - DNA, 13 bp, Artificial Sequence
  synthetic sequence
tgtcaagcagaca

SEQ ID NO: 7425 - DNA, 13 bp, Artificial Sequence
  synthetic sequence
agtatgaggagca

SEQ ID NO: 7426 - DNA, 13 bp, Artificial Sequence
  synthetic sequence
tgtgactatgttg

SEQ ID NO: 7427 - DNA, 13 bp, Artificial Sequence
  synthetic sequence
aagacatttctgt

SEQ ID NO: 7428 - DNA, 13 bp, Artificial Sequence
  synthetic sequence
cagagtacacgga

SEQ ID NO: 7429 - DNA, 13 bp, Artificial Sequence
  synthetic sequence
agtggactggtac

SEQ ID NO: 7430 - DNA, 13 bp, Artificial Sequence
  synthetic sequence
gggagaggttctc

SEQ ID NO: 7431 - DNA, 13 bp, Artificial Sequence
  synthetic sequence
gacaatgatccat

SEQ ID NO: 7432 - DNA, 13 bp, Artificial Sequence
  synthetic sequence
ttatgaagttgag

SEQ ID NO: 7433 - DNA, 13 bp, Artificial Sequence
  synthetic sequence
gataattgggatc

SEQ ID NO: 7434 - DNA, 13 bp, Artificial Sequence
  synthetic sequence
catccgttgcatg

SEQ ID NO: 7435 - DNA, 13 bp, Artificial Sequence
  synthetic sequence
ggaaaattgctgg

SEQ ID NO: 7436 - DNA, 13 bp, Artificial Sequence
  synthetic sequence
ggtgtctaatttt

SEQ ID NO: 7437 - DNA, 13 bp, Artificial Sequence
  synthetic sequence
ttagcgggacaag

SEQ ID NO: 7438 - DNA, 13 bp, Artificial Sequence
  synthetic sequence
aaagagtgtttgt

SEQ ID NO: 7439 - DNA, 13 bp, Artificial Sequence
  synthetic sequence
cgagaacacggta

SEQ ID NO: 7440 - DNA, 13 bp, Artificial Sequence
  synthetic sequence
cttcctcttgatc

SEQ ID NO: 7441 - DNA, 13 bp, Artificial Sequence
  synthetic sequence
cctcctcccaaga

SEQ ID NO: 7442 - DNA, 13 bp, Artificial Sequence
  synthetic sequence
ccttgacaaaaag

SEQ ID NO: 7443 - DNA, 13 bp, Artificial Sequence
  synthetic sequence
aggcaaactttac

SEQ ID NO: 7444 - DNA, 13 bp, Artificial Sequence
  synthetic sequence
ataaggcaaagga

SEQ ID NO: 7445 - DNA, 13 bp, Artificial Sequence
  synthetic sequence
ccgaggtaaatcg

SEQ ID NO: 7446 - DNA, 13 bp, Artificial Sequence
  synthetic sequence
tctcacgcatgtc

SEQ ID NO: 7447 - DNA, 13 bp, Artificial Sequence
  synthetic sequence
tcttccgccggtg

SEQ ID NO: 7448 - DNA, 13 bp, Artificial Sequence
  synthetic sequence
gaactccaagcgc

SEQ ID NO: 7449 - DNA, 13 bp, Artificial Sequence
  synthetic sequence
ttcttcgcaaaaa

SEQ ID NO: 7450 - DNA, 13 bp, Artificial Sequence
  synthetic sequence
gaaaaggcttcgt

SEQ ID NO: 7451 - DNA, 13 bp, Artificial Sequence
  synthetic sequence
gtttttatcataa

SEQ ID NO: 7452 - DNA, 13 bp, Artificial Sequence
  synthetic sequence
gcttgccatacca

SEQ ID NO: 7453 - DNA, 13 bp, Artificial Sequence
  synthetic sequence
tagcccgttaatt

SEQ ID NO: 7454 - DNA, 13 bp, Artificial Sequence
  synthetic sequence
cactttctcaagt

SEQ ID NO: 7455 - DNA, 13 bp, Artificial Sequence
  synthetic sequence
aaaccatcagcgc

SEQ ID NO: 7456 - DNA, 13 bp, Artificial Sequence
  synthetic sequence
ccactactgaatt

SEQ ID NO: 7457 - DNA, 13 bp, Artificial Sequence
  synthetic sequence
accaaccatctgt

SEQ ID NO: 7458 - DNA, 13 bp, Artificial Sequence
  synthetic sequence
cccagaattcttg

SEQ ID NO: 7459 - DNA, 13 bp, Artificial Sequence
  synthetic sequence
acatattcaatgt

SEQ ID NO: 7460 - DNA, 13 bp, Artificial Sequence
  synthetic sequence
tctagcaatcgtg

SEQ ID NO: 7461 - DNA, 13 bp, Artificial Sequence
  synthetic sequence
cagggttattcaa

SEQ ID NO: 7462 - DNA, 13 bp, Artificial Sequence
  synthetic sequence
tctttcacattac

SEQ ID NO: 7463 - DNA, 13 bp, Artificial Sequence
  synthetic sequence
gcattcttggatg

SEQ ID NO: 7464 - DNA, 13 bp, Artificial Sequence
  synthetic sequence
cactctttataga

SEQ ID NO: 7465 - DNA, 13 bp, Artificial Sequence
  synthetic sequence
agtaatatgaatt

SEQ ID NO: 7466 - DNA, 13 bp, Artificial Sequence
  synthetic sequence
ctgacgcaaaatg

SEQ ID NO: 7467 - DNA, 13 bp, Artificial Sequence
  synthetic sequence
cgttctgcgtctg

SEQ ID NO: 7468 - DNA, 13 bp, Artificial Sequence
  synthetic sequence
caaacaagccaaa

SEQ ID NO: 7469 - DNA, 13 bp, Artificial Sequence
  synthetic sequence
tcaagtgcatcat

SEQ ID NO: 7470 - DNA, 13 bp, Artificial Sequence
  synthetic sequence
ccgcagtatttaa

SEQ ID NO: 7471 - DNA, 13 bp, Artificial Sequence
  synthetic sequence
tcaaggatacgtg

SEQ ID NO: 7472 - DNA, 13 bp, Artificial Sequence
  synthetic sequence
ctcataacctaac

SEQ ID NO: 7473 - DNA, 13 bp, Artificial Sequence
  synthetic sequence
aacatccattaaa

SEQ ID NO: 7474 - DNA, 13 bp, Artificial Sequence
  synthetic sequence
tctttagatacaa

SEQ ID NO: 7475 - DNA, 13 bp, Artificial Sequence
  synthetic sequence
ctacataattatc

SEQ ID NO: 7476 - DNA, 13 bp, Artificial Sequence
  synthetic sequence
ctcaacgataaat

SEQ ID NO: 7477 - DNA, 13 bp, Artificial Sequence
  synthetic sequence
cgctcccagcaat

SEQ ID NO: 7478 - DNA, 13 bp, Artificial Sequence
  synthetic sequence
agcttaatgtccc

SEQ ID NO: 7479 - DNA, 13 bp, Artificial Sequence
  synthetic sequence
cttttcatgcaac

SEQ ID NO: 7480 - DNA, 13 bp, Artificial Sequence
  synthetic sequence
ttctaccagtccg

SEQ ID NO: 7481 - DNA, 13 bp, Artificial Sequence
  synthetic sequence
tcatggattgcgc

SEQ ID NO: 7482 - DNA, 13 bp, Artificial Sequence
  synthetic sequence
ccatatcacctct

SEQ ID NO: 7483 - DNA, 13 bp, Artificial Sequence
  synthetic sequence
aatacctaaagta

SEQ ID NO: 7484 - DNA, 13 bp, Artificial Sequence
  synthetic sequence
cctcctcccaaga

SEQ ID NO: 7485 - DNA, 13 bp, Artificial Sequence
  synthetic sequence
ccttgacaaaaag

SEQ ID NO: 7486 - DNA, 13 bp, Artificial Sequence
  synthetic sequence
aggcaaactttac

SEQ ID NO: 7487 - DNA, 13 bp, Artificial Sequence
  synthetic sequence
ataaggcaaagga

SEQ ID NO: 7488 - DNA, 13 bp, Artificial Sequence
  synthetic sequence
ccgaggtaaatcg

SEQ ID NO: 7489 - DNA, 13 bp, Artificial Sequence
  synthetic sequence
tctcacgcatgtc

SEQ ID NO: 7490 - DNA, 13 bp, Artificial Sequence
  synthetic sequence
tcttccgccggtg

SEQ ID NO: 7491 - DNA, 13 bp, Artificial Sequence
  synthetic sequence
gaactccaagcgc

SEQ ID NO: 7492 - DNA, 13 bp, Artificial Sequence
  synthetic sequence
ttcttcgcaaaaa

SEQ ID NO: 7493 - DNA, 13 bp, Artificial Sequence
  synthetic sequence
gaaaaggcttcgt

SEQ ID NO: 7494 - DNA, 13 bp, Artificial Sequence
  synthetic sequence
gtttttatcataa

SEQ ID NO: 7495 - DNA, 13 bp, Artificial Sequence
  synthetic sequence
gcttgccatacca

SEQ ID NO: 7496 - DNA, 13 bp, Artificial Sequence
  synthetic sequence
tagcccgttaatt

SEQ ID NO: 7497 - DNA, 13 bp, Artificial Sequence
  synthetic sequence
cactttctcaagt

SEQ ID NO: 7498 - DNA, 13 bp, Artificial Sequence
  synthetic sequence
aaaccatcagcgc

SEQ ID NO: 7499 - DNA, 13 bp, Artificial Sequence
  synthetic sequence
ccactactgaatt

SEQ ID NO: 7500 - DNA, 13 bp, Artificial Sequence
  synthetic sequence
accaaccatctgt

SEQ ID NO: 7501 - DNA, 13 bp, Artificial Sequence
  synthetic sequence
cccagaattcttg

SEQ ID NO: 7502 - DNA, 13 bp, Artificial Sequence
  synthetic sequence
acatattcaatgt

SEQ ID NO: 7503 - DNA, 13 bp, Artificial Sequence
  synthetic sequence
tctagcaatcgtg

SEQ ID NO: 7504 - DNA, 13 bp, Artificial Sequence
  synthetic sequence
cagggttattcaa

SEQ ID NO: 7505 - DNA, 13 bp, Artificial Sequence
  synthetic sequence
tctttcacattac

SEQ ID NO: 7506 - DNA, 13 bp, Artificial Sequence
  synthetic sequence
gcattcttggatg

SEQ ID NO: 7507 - DNA, 13 bp, Artificial Sequence
  synthetic sequence
cactctttataga

SEQ ID NO: 7508 - DNA, 13 bp, Artificial Sequence
  synthetic sequence
agtaatatgaatt

SEQ ID NO: 7509 - DNA, 13 bp, Artificial Sequence
  synthetic sequence
ctgacgcaaaatg

SEQ ID NO: 7510 - DNA, 13 bp, Artificial Sequence
  synthetic sequence
cgttctgcgtctg

SEQ ID NO: 7511 - DNA, 13 bp, Artificial Sequence
  synthetic sequence
caaacaagccaaa

SEQ ID NO: 7512 - DNA, 13 bp, Artificial Sequence
  synthetic sequence
tcaagtgcatcat

SEQ ID NO: 7513 - DNA, 13 bp, Artificial Sequence
  synthetic sequence
ccgcagtatttaa

SEQ ID NO: 7514 - DNA, 13 bp, Artificial Sequence
  synthetic sequence
tcaaggatacgtg

SEQ ID NO: 7515 - DNA, 13 bp, Artificial Sequence
  synthetic sequence
ctcataacctaac

SEQ ID NO: 7516 - DNA, 13 bp, Artificial Sequence
  synthetic sequence
aacatccattaaa

SEQ ID NO: 7517 - DNA, 13 bp, Artificial Sequence
  synthetic sequence
tctttagatacaa

SEQ ID NO: 7518 - DNA, 13 bp, Artificial Sequence
  synthetic sequence
ctacataattatc

SEQ ID NO: 7519 - DNA, 13 bp, Artificial Sequence
  synthetic sequence
ctcaacgataaat

SEQ ID NO: 7520 - DNA, 13 bp, Artificial Sequence
  synthetic sequence
cgctcccagcaat

SEQ ID NO: 7521 - DNA, 13 bp, Artificial Sequence
  synthetic sequence
agcttaatgtccc

SEQ ID NO: 7522 - DNA, 13 bp, Artificial Sequence
  synthetic sequence
cttttcatgcaac

SEQ ID NO: 7523 - DNA, 13 bp, Artificial Sequence
  synthetic sequence
ttctaccagtccg

SEQ ID NO: 7524 - DNA, 13 bp, Artificial Sequence
  synthetic sequence
tcatggattgcgc

SEQ ID NO: 7525 - DNA, 13 bp, Artificial Sequence
  synthetic sequence
ccatatcacctct

SEQ ID NO: 7526 - DNA, 13 bp, Artificial Sequence
  synthetic sequence
aatacctaaagta

SEQ ID NO: 7527 - DNA, 13 bp, Artificial Sequence
  synthetic sequence
cctcctcccaaga

SEQ ID NO: 7528 - DNA, 13 bp, Artificial Sequence
  synthetic sequence
ccttgacaaaaag

SEQ ID NO: 7529 - DNA, 13 bp, Artificial Sequence
  synthetic sequence
aggcaaactttac

SEQ ID NO: 7530 - DNA, 13 bp, Artificial Sequence
  synthetic sequence
ataaggcaaagga

SEQ ID NO: 7531 - DNA, 13 bp, Artificial Sequence
  synthetic sequence
ccgaggtaaatcg

SEQ ID NO: 7532 - DNA, 13 bp, Artificial Sequence
  synthetic sequence
tctcacgcatgtc

SEQ ID NO: 7533 - DNA, 13 bp, Artificial Sequence
  synthetic sequence
tcttccgccggtg

SEQ ID NO: 7534 - DNA, 13 bp, Artificial Sequence
  synthetic sequence
gaactccaagcgc

SEQ ID NO: 7535 - DNA, 13 bp, Artificial Sequence
  synthetic sequence
ttcttcgcaaaaa

SEQ ID NO: 7536 - DNA, 13 bp, Artificial Sequence
  synthetic sequence
gaaaaggcttcgt

SEQ ID NO: 7537 - DNA, 13 bp, Artificial Sequence
  synthetic sequence
gtttttatcataa

SEQ ID NO: 7538 - DNA, 13 bp, Artificial Sequence
  synthetic sequence
gcttgccatacca

SEQ ID NO: 7539 - DNA, 13 bp, Artificial Sequence
  synthetic sequence
tagcccgttaatt

SEQ ID NO: 7540 - DNA, 13 bp, Artificial Sequence
  synthetic sequence
cactttctcaagt

SEQ ID NO: 7541 - DNA, 13 bp, Artificial Sequence
  synthetic sequence
aaaccatcagcgc

SEQ ID NO: 7542 - DNA, 13 bp, Artificial Sequence
  synthetic sequence
ccactactgaatt

SEQ ID NO: 7543 - DNA, 13 bp, Artificial Sequence
  synthetic sequence
accaaccatctgt

SEQ ID NO: 7544 - DNA, 13 bp, Artificial Sequence
  synthetic sequence
cccagaattcttg

SEQ ID NO: 7545 - DNA, 13 bp, Artificial Sequence
  synthetic sequence
acatattcaatgt

SEQ ID NO: 7546 - DNA, 13 bp, Artificial Sequence
  synthetic sequence
tctagcaatcgtg

SEQ ID NO: 7547 - DNA, 13 bp, Artificial Sequence
  synthetic sequence
cagggttattcaa

SEQ ID NO: 7548 - DNA, 13 bp, Artificial Sequence
  synthetic sequence
tctttcacattac

SEQ ID NO: 7549 - DNA, 13 bp, Artificial Sequence
  synthetic sequence
gcattcttggatg

SEQ ID NO: 7550 - DNA, 13 bp, Artificial Sequence
  synthetic sequence
cactctttataga

SEQ ID NO: 7551 - DNA, 13 bp, Artificial Sequence
  synthetic sequence
agtaatatgaatt

SEQ ID NO: 7552 - DNA, 13 bp, Artificial Sequence
  synthetic sequence
ctgacgcaaaatg

SEQ ID NO: 7553 - DNA, 13 bp, Artificial Sequence
  synthetic sequence
cgttctgcgtctg

SEQ ID NO: 7554 - DNA, 13 bp, Artificial Sequence
  synthetic sequence
caaacaagccaaa

SEQ ID NO: 7555 - DNA, 13 bp, Artificial Sequence
  synthetic sequence
tcaagtgcatcat

SEQ ID NO: 7556 - DNA, 13 bp, Artificial Sequence
  synthetic sequence
ccgcagtatttaa

SEQ ID NO: 7557 - DNA, 13 bp, Artificial Sequence
  synthetic sequence
tcaaggatacgtg

SEQ ID NO: 7558 - DNA, 13 bp, Artificial Sequence
  synthetic sequence
ctcataacctaac

SEQ ID NO: 7559 - DNA, 13 bp, Artificial Sequence
  synthetic sequence
aacatccattaaa

SEQ ID NO: 7560 - DNA, 13 bp, Artificial Sequence
  synthetic sequence
tctttagatacaa

SEQ ID NO: 7561 - DNA, 13 bp, Artificial Sequence
  synthetic sequence
ctacataattatc

SEQ ID NO: 7562 - DNA, 13 bp, Artificial Sequence
  synthetic sequence
ctcaacgataaat

SEQ ID NO: 7563 - DNA, 13 bp, Artificial Sequence
  synthetic sequence
cgctcccagcaat

SEQ ID NO: 7564 - DNA, 13 bp, Artificial Sequence
  synthetic sequence
agcttaatgtccc

SEQ ID NO: 7565 - DNA, 13 bp, Artificial Sequence
  synthetic sequence
cttttcatgcaac

SEQ ID NO: 7566 - DNA, 13 bp, Artificial Sequence
  synthetic sequence
ttctaccagtccg

SEQ ID NO: 7567 - DNA, 13 bp, Artificial Sequence
  synthetic sequence
tcatggattgcgc

SEQ ID NO: 7568 - DNA, 13 bp, Artificial Sequence
  synthetic sequence
ccatatcacctct

SEQ ID NO: 7569 - DNA, 13 bp, Artificial Sequence
  synthetic sequence
aatacctaaagta

SEQ ID NO: 7570 - DNA, 13 bp, Artificial Sequence
  synthetic sequence
atcttgcgttaca

SEQ ID NO: 7571 - DNA, 13 bp, Artificial Sequence
  synthetic sequence
ggccagagccggg

SEQ ID NO: 7572 - DNA, 13 bp, Artificial Sequence
  synthetic sequence
caaagcaccccaa

SEQ ID NO: 7573 - DNA, 13 bp, Artificial Sequence
  synthetic sequence
ttgtaagacaatc

SEQ ID NO: 7574 - DNA, 13 bp, Artificial Sequence
  synthetic sequence
agcccagaggctc

SEQ ID NO: 7575 - DNA, 13 bp, Artificial Sequence
  synthetic sequence
ccacatgtccccc

SEQ ID NO: 7576 - DNA, 13 bp, Artificial Sequence
  synthetic sequence
tcaccaactcctg

SEQ ID NO: 7577 - DNA, 13 bp, Artificial Sequence
  synthetic sequence
gagaccagagcca

SEQ ID NO: 7578 - DNA, 13 bp, Artificial Sequence
  synthetic sequence
gacacaagagcca

SEQ ID NO: 7579 - DNA, 13 bp, Artificial Sequence
  synthetic sequence
atccctaccagga

SEQ ID NO: 7580 - DNA, 13 bp, Artificial Sequence
  synthetic sequence
cagcagcaccagc

SEQ ID NO: 7581 - DNA, 13 bp, Artificial Sequence
  synthetic sequence
actacaaaggcct

SEQ ID NO: 7582 - DNA, 13 bp, Artificial Sequence
  synthetic sequence
ccacctgcaacac

SEQ ID NO: 7583 - DNA, 13 bp, Artificial Sequence
  synthetic sequence
caataggaagagc

SEQ ID NO: 7584 - DNA, 13 bp, Artificial Sequence
  synthetic sequence
atcttgcgttaca

SEQ ID NO: 7585 - DNA, 13 bp, Artificial Sequence
  synthetic sequence
ggccagagccggg

SEQ ID NO: 7586 - DNA, 13 bp, Artificial Sequence
  synthetic sequence
caaagcaccccaa

SEQ ID NO: 7587 - DNA, 13 bp, Artificial Sequence
  synthetic sequence
ttgtaagacaatc

SEQ ID NO: 7588 - DNA, 13 bp, Artificial Sequence
  synthetic sequence
agcccagaggctc

SEQ ID NO: 7589 - DNA, 13 bp, Artificial Sequence
  synthetic sequence
ccacatgtccccc

SEQ ID NO: 7590 - DNA, 13 bp, Artificial Sequence
  synthetic sequence
tcaccaactcctg

SEQ ID NO: 7591 - DNA, 13 bp, Artificial Sequence
  synthetic sequence
gagaccagagcca

SEQ ID NO: 7592 - DNA, 13 bp, Artificial Sequence
  synthetic sequence
gacacaagagcca

SEQ ID NO: 7593 - DNA, 13 bp, Artificial Sequence
  synthetic sequence
atccctaccagga

SEQ ID NO: 7594 - DNA, 13 bp, Artificial Sequence
  synthetic sequence
cagcagcaccagc

SEQ ID NO: 7595 - DNA, 13 bp, Artificial Sequence
  synthetic sequence
actacaaaggcct

SEQ ID NO: 7596 - DNA, 13 bp, Artificial Sequence
  synthetic sequence
ccacctgcaacac

SEQ ID NO: 7597 - DNA, 13 bp, Artificial Sequence
  synthetic sequence
caataggaagagc

SEQ ID NO: 7598 - DNA, 13 bp, Artificial Sequence
  synthetic sequence
ggcgaggtctttt

SEQ ID NO: 7599 - DNA, 13 bp, Artificial Sequence
  synthetic sequence
tctaagtctgcgg

SEQ ID NO: 7600 - DNA, 13 bp, Artificial Sequence
  synthetic sequence
tgcaagacaggga

SEQ ID NO: 7601 - DNA, 13 bp, Artificial Sequence
  synthetic sequence
gccccgagggtag

SEQ ID NO: 7602 - DNA, 13 bp, Artificial Sequence
  synthetic sequence
agtggttgtggag

SEQ ID NO: 7603 - DNA, 13 bp, Artificial Sequence
  synthetic sequence
ggtccatgcccga

SEQ ID NO: 7604 - DNA, 13 bp, Artificial Sequence
  synthetic sequence
ttgtgggccttgt

SEQ ID NO: 7605 - DNA, 13 bp, Artificial Sequence
  synthetic sequence
ggttcatgtattg

SEQ ID NO: 7606 - DNA, 13 bp, Artificial Sequence
  synthetic sequence
gaccgaggactgg

SEQ ID NO: 7607 - DNA, 13 bp, Artificial Sequence
  synthetic sequence
cataggtggaatg

SEQ ID NO: 7608 - DNA, 13 bp, Artificial Sequence
  synthetic sequence
gtagtggtgtggg

SEQ ID NO: 7609 - DNA, 13 bp, Artificial Sequence
  synthetic sequence
acccccgtgtttt

SEQ ID NO: 7610 - DNA, 13 bp, Artificial Sequence
  synthetic sequence
atgttcccatacc

SEQ ID NO: 7611 - DNA, 13 bp, Artificial Sequence
  synthetic sequence
tggccgcacgaag

SEQ ID NO: 7612 - DNA, 13 bp, Artificial Sequence
  synthetic sequence
gacaccttgcaag

SEQ ID NO: 7613 - DNA, 13 bp, Artificial Sequence
  synthetic sequence
gataccctccagt

SEQ ID NO: 7614 - DNA, 13 bp, Artificial Sequence
  synthetic sequence
acttgcagcgctt

SEQ ID NO: 7615 - DNA, 13 bp, Artificial Sequence
  synthetic sequence
gtgcacagttgcc

SEQ ID NO: 7616 - DNA, 13 bp, Artificial Sequence
  synthetic sequence
gagcgtcagctgg

SEQ ID NO: 7617 - DNA, 13 bp, Artificial Sequence
  synthetic sequence
cacacagcagtga

SEQ ID NO: 7618 - DNA, 13 bp, Artificial Sequence
  synthetic sequence
cagtcaccggaga

SEQ ID NO: 7619 - DNA, 13 bp, Artificial Sequence
  synthetic sequence
cgctcggaagagt

SEQ ID NO: 7620 - DNA, 13 bp, Artificial Sequence
  synthetic sequence
ccaaggtgaaaat

SEQ ID NO: 7621 - DNA, 13 bp, Artificial Sequence
  synthetic sequence
cgacagcgaatgt

SEQ ID NO: 7622 - DNA, 13 bp, Artificial Sequence
  synthetic sequence
accctgattttac

SEQ ID NO: 7623 - DNA, 13 bp, Artificial Sequence
  synthetic sequence
ttcgaacgatgga

SEQ ID NO: 7624 - DNA, 13 bp, Artificial Sequence
  synthetic sequence
ctatcagtggtga

SEQ ID NO: 7625 - DNA, 13 bp, Artificial Sequence
  synthetic sequence
cacaagcgtgcag

SEQ ID NO: 7626 - DNA, 13 bp, Artificial Sequence
  synthetic sequence
gaagacggatgga

SEQ ID NO: 7627 - DNA, 13 bp, Artificial Sequence
  synthetic sequence
tgcaggtctgcac

SEQ ID NO: 7628 - DNA, 13 bp, Artificial Sequence
  synthetic sequence
agatcgacaacct

SEQ ID NO: 7629 - DNA, 13 bp, Artificial Sequence
  synthetic sequence
acggatgtcaaac

SEQ ID NO: 7630 - DNA, 13 bp, Artificial Sequence
  synthetic sequence
caaccaccctgca

SEQ ID NO: 7631 - DNA, 13 bp, Artificial Sequence
  synthetic sequence
acgtcggcgatat

SEQ ID NO: 7632 - DNA, 13 bp, Artificial Sequence
  synthetic sequence
tggctcctttgca

SEQ ID NO: 7633 - DNA, 13 bp, Artificial Sequence
  synthetic sequence
agcgggagaccta

SEQ ID NO: 7634 - DNA, 13 bp, Artificial Sequence
  synthetic sequence
agttattaaagag

SEQ ID NO: 7635 - DNA, 13 bp, Artificial Sequence
  synthetic sequence
aaaattacggagt

SEQ ID NO: 7636 - DNA, 13 bp, Artificial Sequence
  synthetic sequence
caccacttgcagc

SEQ ID NO: 7637 - DNA, 13 bp, Artificial Sequence
  synthetic sequence
acctgcaatcacg

SEQ ID NO: 7638 - DNA, 13 bp, Artificial Sequence
  synthetic sequence
tgccgctgtgaaa

SEQ ID NO: 7639 - DNA, 13 bp, Artificial Sequence
  synthetic sequence
cctgactatcagt

SEQ ID NO: 7640 - DNA, 13 bp, Artificial Sequence
  synthetic sequence
tggttaataccag

SEQ ID NO: 7641 - DNA, 13 bp, Artificial Sequence
  synthetic sequence
gtagaaggcagaa

SEQ ID NO: 7642 - DNA, 13 bp, Artificial Sequence
  synthetic sequence
ataacaaggtggt

SEQ ID NO: 7643 - DNA, 13 bp, Artificial Sequence
  synthetic sequence
ccctatatctata

SEQ ID NO: 7644 - DNA, 13 bp, Artificial Sequence
  synthetic sequence
agggcgacacttt

SEQ ID NO: 7645 - DNA, 13 bp, Artificial Sequence
  synthetic sequence
tggcacgcccgta

SEQ ID NO: 7646 - DNA, 13 bp, Artificial Sequence
  synthetic sequence
aagaagcctgcgc

SEQ ID NO: 7647 - DNA, 13 bp, Artificial Sequence
  synthetic sequence
attgccctaactg

SEQ ID NO: 7648 - DNA, 13 bp, Artificial Sequence
  synthetic sequence
aattgtgcagtgg

SEQ ID NO: 7649 - DNA, 13 bp, Artificial Sequence
  synthetic sequence
aacttcatgtgcc

SEQ ID NO: 7650 - DNA, 13 bp, Artificial Sequence
  synthetic sequence
ttcgataataagg

SEQ ID NO: 7651 - DNA, 13 bp, Artificial Sequence
  synthetic sequence
caaccactgctgt

SEQ ID NO: 7652 - DNA, 13 bp, Artificial Sequence
  synthetic sequence
cgtctgcatccag

SEQ ID NO: 7653 - DNA, 13 bp, Artificial Sequence
  synthetic sequence
gttcggggctagt

SEQ ID NO: 7654 - DNA, 13 bp, Artificial Sequence
  synthetic sequence
tccacccaggaca

SEQ ID NO: 7655 - DNA, 13 bp, Artificial Sequence
  synthetic sequence
ggcgccgcagaca

SEQ ID NO: 7656 - DNA, 13 bp, Artificial Sequence
  synthetic sequence
agtgcctgtgtgt

SEQ ID NO: 7657 - DNA, 13 bp, Artificial Sequence
  synthetic sequence
aggctcctcccca

SEQ ID NO: 7658 - DNA, 13 bp, Artificial Sequence
  synthetic sequence
cttctatagctat

SEQ ID NO: 7659 - DNA, 13 bp, Artificial Sequence
  synthetic sequence
ggaatgtaaatga

SEQ ID NO: 7660 - DNA, 13 bp, Artificial Sequence
  synthetic sequence
ggccttcttcagc

SEQ ID NO: 7661 - DNA, 13 bp, Artificial Sequence
  synthetic sequence
cctgactcttgag

SEQ ID NO: 7662 - DNA, 13 bp, Artificial Sequence
  synthetic sequence
ctcatgtaggcca

SEQ ID NO: 7663 - DNA, 13 bp, Artificial Sequence
  synthetic sequence
ccaaacggggcta

SEQ ID NO: 7664 - DNA, 13 bp, Artificial Sequence
  synthetic sequence
atgaattggacag

SEQ ID NO: 7665 - DNA, 13 bp, Artificial Sequence
  synthetic sequence
ttcttttcataac

SEQ ID NO: 7666 - DNA, 13 bp, Artificial Sequence
  synthetic sequence
ggcctgaattcta

SEQ ID NO: 7667 - DNA, 13 bp, Artificial Sequence
  synthetic sequence
ggcagtcttccag

SEQ ID NO: 7668 - DNA, 13 bp, Artificial Sequence
  synthetic sequence
ctattttcgcggg

SEQ ID NO: 7669 - DNA, 13 bp, Artificial Sequence
  synthetic sequence
tggtcggcaacta

SEQ ID NO: 7670 - DNA, 13 bp, Artificial Sequence
  synthetic sequence
tggggtcgttgta

SEQ ID NO: 7671 - DNA, 13 bp, Artificial Sequence
  synthetic sequence
atttcactactgg

SEQ ID NO: 7672 - DNA, 13 bp, Artificial Sequence
  synthetic sequence
atagccacacagg

SEQ ID NO: 7673 - DNA, 13 bp, Artificial Sequence
  synthetic sequence
agtagtatttcac

SEQ ID NO: 7674 - DNA, 13 bp, Artificial Sequence
  synthetic sequence
tatgttgtgctgg

SEQ ID NO: 7675 - DNA, 13 bp, Artificial Sequence
  synthetic sequence
ctgctttgccggt

SEQ ID NO: 7676 - DNA, 13 bp, Artificial Sequence
  synthetic sequence
ctggtgtatcttt

SEQ ID NO: 7677 - DNA, 13 bp, Artificial Sequence
  synthetic sequence
tttcagatattct

SEQ ID NO: 7678 - DNA, 13 bp, Artificial Sequence
  synthetic sequence
gctgtatctgtag

SEQ ID NO: 7679 - DNA, 13 bp, Artificial Sequence
  synthetic sequence
tgtttcaaagtca

SEQ ID NO: 7680 - DNA, 13 bp, Artificial Sequence
  synthetic sequence
tgttctcatactg

SEQ ID NO: 7681 - DNA, 13 bp, Artificial Sequence
  synthetic sequence
tcctggttctcct

SEQ ID NO: 7682 - DNA, 13 bp, Artificial Sequence
  synthetic sequence
tgtcgagttggat

SEQ ID NO: 7683 - DNA, 13 bp, Artificial Sequence
  synthetic sequence
tgtcccctggtgg

SEQ ID NO: 7684 - DNA, 13 bp, Artificial Sequence
  synthetic sequence
cccacgacgcacg

SEQ ID NO: 7685 - DNA, 13 bp, Artificial Sequence
  synthetic sequence
ggtgccagcgtgg

SEQ ID NO: 7686 - DNA, 13 bp, Artificial Sequence
  synthetic sequence
ccactgccgtagc

SEQ ID NO: 7687 - DNA, 13 bp, Artificial Sequence
  synthetic sequence
cacagctccatga

SEQ ID NO: 7688 - DNA, 13 bp, Artificial Sequence
  synthetic sequence
ccggtgccagtgt

SEQ ID NO: 7689 - DNA, 13 bp, Artificial Sequence
  synthetic sequence
ctcaatccattgt

SEQ ID NO: 7690 - DNA, 13 bp, Artificial Sequence
  synthetic sequence
tgtaatagccgtg

SEQ ID NO: 7691 - DNA, 13 bp, Artificial Sequence
  synthetic sequence
gcatgcgtaacca

SEQ ID NO: 7692 - DNA, 13 bp, Artificial Sequence
  synthetic sequence
gagtgtccaaatc

SEQ ID NO: 7693 - DNA, 13 bp, Artificial Sequence
  synthetic sequence
ggataatcgacga

SEQ ID NO: 7694 - DNA, 13 bp, Artificial Sequence
  synthetic sequence
ggtgctcgttgtt

SEQ ID NO: 7695 - DNA, 13 bp, Artificial Sequence
  synthetic sequence
agcctgtgggttg

SEQ ID NO: 7696 - DNA, 13 bp, Artificial Sequence
  synthetic sequence
actctgcagcgga

SEQ ID NO: 7697 - DNA, 13 bp, Artificial Sequence
  synthetic sequence
cgtgtagatcagg

SEQ ID NO: 7698 - DNA, 13 bp, Artificial Sequence
  synthetic sequence
atgggacgctcta

SEQ ID NO: 7699 - DNA, 13 bp, Artificial Sequence
  synthetic sequence
atggtgacaattg

SEQ ID NO: 7700 - DNA, 13 bp, Artificial Sequence
  synthetic sequence
tatcaatagactg

SEQ ID NO: 7701 - DNA, 13 bp, Artificial Sequence
  synthetic sequence
atgcagcgcttgt

SEQ ID NO: 7702 - DNA, 13 bp, Artificial Sequence
  synthetic sequence
cagctcaagtgtc

SEQ ID NO: 7703 - DNA, 13 bp, Artificial Sequence
  synthetic sequence
tgtggtttagagc

SEQ ID NO: 7704 - DNA, 13 bp, Artificial Sequence
  synthetic sequence
caattagatcagt

SEQ ID NO: 7705 - DNA, 13 bp, Artificial Sequence
  synthetic sequence
cagtacatgtatg

SEQ ID NO: 7706 - DNA, 13 bp, Artificial Sequence
  synthetic sequence
taaattacacaac

SEQ ID NO: 7707 - DNA, 13 bp, Artificial Sequence
  synthetic sequence
tagaagccctctt

SEQ ID NO: 7708 - DNA, 13 bp, Artificial Sequence
  synthetic sequence
tcttaaagagagg

SEQ ID NO: 7709 - DNA, 13 bp, Artificial Sequence
  synthetic sequence
gcggtaagcccac

SEQ ID NO: 7710 - DNA, 13 bp, Artificial Sequence
  synthetic sequence
gaacctggtgact

SEQ ID NO: 7711 - DNA, 13 bp, Artificial Sequence
  synthetic sequence
ctggaagagatgg

SEQ ID NO: 7712 - DNA, 13 bp, Artificial Sequence
  synthetic sequence
gacccgaagaaat

SEQ ID NO: 7713 - DNA, 13 bp, Artificial Sequence
  synthetic sequence
aaagtgagatata

SEQ ID NO: 7714 - DNA, 13 bp, Artificial Sequence
  synthetic sequence
atatggtatcaaa

SEQ ID NO: 7715 - DNA, 13 bp, Artificial Sequence
  synthetic sequence
tcaccaagcccag

SEQ ID NO: 7716 - DNA, 13 bp, Artificial Sequence
  synthetic sequence
actcactccctcc

SEQ ID NO: 7717 - DNA, 13 bp, Artificial Sequence
  synthetic sequence
tggtcaccctcac

SEQ ID NO: 7718 - DNA, 13 bp, Artificial Sequence
  synthetic sequence
atgcaacggcagt

SEQ ID NO: 7719 - DNA, 13 bp, Artificial Sequence
  synthetic sequence
ctgatgttttgac

SEQ ID NO: 7720 - DNA, 13 bp, Artificial Sequence
  synthetic sequence
tataccacccatg

SEQ ID NO: 7721 - DNA, 13 bp, Artificial Sequence
  synthetic sequence
cagtctgctgcct

SEQ ID NO: 7722 - DNA, 13 bp, Artificial Sequence
  synthetic sequence
ctgcagtagggtg

SEQ ID NO: 7723 - DNA, 13 bp, Artificial Sequence
  synthetic sequence
aaatcagcaagtt

SEQ ID NO: 7724 - DNA, 13 bp, Artificial Sequence
  synthetic sequence
acaccccacctgg

SEQ ID NO: 7725 - DNA, 13 bp, Artificial Sequence
  synthetic sequence
ctccaagcaaatg

SEQ ID NO: 7726 - DNA, 13 bp, Artificial Sequence
  synthetic sequence
ttctttagccgtg

SEQ ID NO: 7727 - DNA, 13 bp, Artificial Sequence
  synthetic sequence
ctccactatgcaa

SEQ ID NO: 7728 - DNA, 13 bp, Artificial Sequence
  synthetic sequence
atcaccggggcaa

SEQ ID NO: 7729 - DNA, 13 bp, Artificial Sequence
  synthetic sequence
atgggatatgctc

SEQ ID NO: 7730 - DNA, 13 bp, Artificial Sequence
  synthetic sequence
tgcacaccagtgc

SEQ ID NO: 7731 - DNA, 13 bp, Artificial Sequence
  synthetic sequence
caggttggtgcag

SEQ ID NO: 7732 - DNA, 13 bp, Artificial Sequence
  synthetic sequence
aagaaagggaaat

SEQ ID NO: 7733 - DNA, 13 bp, Artificial Sequence
  synthetic sequence
gtggctgtgctgc

SEQ ID NO: 7734 - DNA, 13 bp, Artificial Sequence
  synthetic sequence
aacagagcgcttc

SEQ ID NO: 7735 - DNA, 13 bp, Artificial Sequence
  synthetic sequence
tacaagacggacc

SEQ ID NO: 7736 - DNA, 13 bp, Artificial Sequence
  synthetic sequence
aaagaaccagcag

SEQ ID NO: 7737 - DNA, 13 bp, Artificial Sequence
  synthetic sequence
aggacattgagca

SEQ ID NO: 7738 - DNA, 13 bp, Artificial Sequence
  synthetic sequence
cccatcatgtgta

SEQ ID NO: 7739 - DNA, 13 bp, Artificial Sequence
  synthetic sequence
tcttctgtgacgt

SEQ ID NO: 7740 - DNA, 13 bp, Artificial Sequence
  synthetic sequence
acgacacaggaag

SEQ ID NO: 7741 - DNA, 13 bp, Artificial Sequence
  synthetic sequence
atcattagaggct

SEQ ID NO: 7742 - DNA, 13 bp, Artificial Sequence
  synthetic sequence
aatactgcaggga

SEQ ID NO: 7743 - DNA, 13 bp, Artificial Sequence
  synthetic sequence
aattgtgcaacca

SEQ ID NO: 7744 - DNA, 13 bp, Artificial Sequence
  synthetic sequence
gtgatgcagtcca

SEQ ID NO: 7745 - DNA, 13 bp, Artificial Sequence
  synthetic sequence
tttgcgggtctgc

SEQ ID NO: 7746 - DNA, 13 bp, Artificial Sequence
  synthetic sequence
gatcacgtgcgct

SEQ ID NO: 7747 - DNA, 13 bp, Artificial Sequence
  synthetic sequence
ctaagcaagctct

SEQ ID NO: 7748 - DNA, 13 bp, Artificial Sequence
  synthetic sequence
tacatggataaat

SEQ ID NO: 7749 - DNA, 13 bp, Artificial Sequence
  synthetic sequence
aaactcttgatta

SEQ ID NO: 7750 - DNA, 13 bp, Artificial Sequence
  synthetic sequence
tatatgtgggcaa

SEQ ID NO: 7751 - DNA, 13 bp, Artificial Sequence
  synthetic sequence
caattctgccagg

SEQ ID NO: 7752 - DNA, 13 bp, Artificial Sequence
  synthetic sequence
ttggtggatgagc

SEQ ID NO: 7753 - DNA, 13 bp, Artificial Sequence
  synthetic sequence
acagtttcagatt

SEQ ID NO: 7754 - DNA, 13 bp, Artificial Sequence
  synthetic sequence
cattgaagaacca

SEQ ID NO: 7755 - DNA, 13 bp, Artificial Sequence
  synthetic sequence
tgcaagtactacc

SEQ ID NO: 7756 - DNA, 13 bp, Artificial Sequence
  synthetic sequence
agggcatggatcc

SEQ ID NO: 7757 - DNA, 13 bp, Artificial Sequence
  synthetic sequence
aaagaaactggga

SEQ ID NO: 7758 - DNA, 13 bp, Artificial Sequence
  synthetic sequence
aagaagcaatgga

SEQ ID NO: 7759 - DNA, 13 bp, Artificial Sequence
  synthetic sequence
aggtgcaaactga

SEQ ID NO: 7760 - DNA, 13 bp, Artificial Sequence
  synthetic sequence
gaagccaaaagag

SEQ ID NO: 7761 - DNA, 13 bp, Artificial Sequence
  synthetic sequence
ttgactgctcgga

SEQ ID NO: 7762 - DNA, 13 bp, Artificial Sequence
  synthetic sequence
aacttagaagctt

SEQ ID NO: 7763 - DNA, 13 bp, Artificial Sequence
  synthetic sequence
tcacctcagtcgg

SEQ ID NO: 7764 - DNA, 13 bp, Artificial Sequence
  synthetic sequence
tttggtctactgg

SEQ ID NO: 7765 - DNA, 13 bp, Artificial Sequence
  synthetic sequence
tacacataccagg

SEQ ID NO: 7766 - DNA, 13 bp, Artificial Sequence
  synthetic sequence
gggagactgaaca

SEQ ID NO: 7767 - DNA, 13 bp, Artificial Sequence
  synthetic sequence
caaaaacagagtg

SEQ ID NO: 7768 - DNA, 13 bp, Artificial Sequence
  synthetic sequence
aaaccgatcaagg

SEQ ID NO: 7769 - DNA, 13 bp, Artificial Sequence
  synthetic sequence
gaccacgtgcgct

SEQ ID NO: 7770 - DNA, 13 bp, Artificial Sequence
  synthetic sequence
tcggtgggaatgg

SEQ ID NO: 7771 - DNA, 13 bp, Artificial Sequence
  synthetic sequence
aatcctgatgtgt

SEQ ID NO: 7772 - DNA, 13 bp, Artificial Sequence
  synthetic sequence
tggctggatgagg

SEQ ID NO: 7773 - DNA, 13 bp, Artificial Sequence
  synthetic sequence
gacttgttagtct

SEQ ID NO: 7774 - DNA, 13 bp, Artificial Sequence
  synthetic sequence
tcagactcagatg

SEQ ID NO: 7775 - DNA, 13 bp, Artificial Sequence
  synthetic sequence
ctacatggacaaa

SEQ ID NO: 7776 - DNA, 13 bp, Artificial Sequence
  synthetic sequence
ctcttgattaaaa

SEQ ID NO: 7777 - DNA, 13 bp, Artificial Sequence
  synthetic sequence
cattggacttcaa

SEQ ID NO: 7778 - DNA, 13 bp, Artificial Sequence
  synthetic sequence
ttaattggctcag

SEQ ID NO: 7779 - DNA, 13 bp, Artificial Sequence
  synthetic sequence
ttgactgctcaga

SEQ ID NO: 7780 - DNA, 13 bp, Artificial Sequence
  synthetic sequence
cacactagtgctg

SEQ ID NO: 7781 - DNA, 13 bp, Artificial Sequence
  synthetic sequence
tatagggtagtga

SEQ ID NO: 7782 - DNA, 13 bp, Artificial Sequence
  synthetic sequence
ggcaagatgctca

SEQ ID NO: 7783 - DNA, 13 bp, Artificial Sequence
  synthetic sequence
gagccagcagtct

SEQ ID NO: 7784 - DNA, 13 bp, Artificial Sequence
  synthetic sequence
tgcgagttgttca

SEQ ID NO: 7785 - DNA, 13 bp, Artificial Sequence
  synthetic sequence
ccactacacagcc

SEQ ID NO: 7786 - DNA, 13 bp, Artificial Sequence
  synthetic sequence
agcaacttagaag

SEQ ID NO: 7787 - DNA, 13 bp, Artificial Sequence
  synthetic sequence
tgattgaagccag

SEQ ID NO: 7788 - DNA, 13 bp, Artificial Sequence
  synthetic sequence
ctctttaactgca

SEQ ID NO: 7789 - DNA, 13 bp, Artificial Sequence
  synthetic sequence
tgaacctgtatgc

SEQ ID NO: 7790 - DNA, 13 bp, Artificial Sequence
  synthetic sequence
gactatgacatgg

SEQ ID NO: 7791 - DNA, 13 bp, Artificial Sequence
  synthetic sequence
ggatcaaccacac

SEQ ID NO: 7792 - DNA, 13 bp, Artificial Sequence
  synthetic sequence
atatgaggatcaa

SEQ ID NO: 7793 - DNA, 13 bp, Artificial Sequence
  synthetic sequence
atgaaattatgca

SEQ ID NO: 7794 - DNA, 13 bp, Artificial Sequence
  synthetic sequence
gtaacttagaagt

SEQ ID NO: 7795 - DNA, 13 bp, Artificial Sequence
  synthetic sequence
gtgatgcaatcca

SEQ ID NO: 7796 - DNA, 13 bp, Artificial Sequence
  synthetic sequence
ttcttcagccgtg

SEQ ID NO: 7797 - DNA, 13 bp, Artificial Sequence
  synthetic sequence
gccactctatgcg

SEQ ID NO: 7798 - DNA, 13 bp, Artificial Sequence
  synthetic sequence
atggatgttatac

SEQ ID NO: 7799 - DNA, 13 bp, Artificial Sequence
  synthetic sequence
ctagtgtggatag

SEQ ID NO: 7800 - DNA, 13 bp, Artificial Sequence
  synthetic sequence
aggcagtgaaaca

SEQ ID NO: 7801 - DNA, 13 bp, Artificial Sequence
  synthetic sequence
tggacaagtatgg

SEQ ID NO: 7802 - DNA, 13 bp, Artificial Sequence
  synthetic sequence
ctccaagcaaacg

SEQ ID NO: 7803 - DNA, 13 bp, Artificial Sequence
  synthetic sequence
tacaagacagacc

SEQ ID NO: 7804 - DNA, 13 bp, Artificial Sequence
  synthetic sequence
gaaccaataattg

SEQ ID NO: 7805 - DNA, 13 bp, Artificial Sequence
  synthetic sequence
tgaggattaaaca

SEQ ID NO: 7806 - DNA, 13 bp, Artificial Sequence
  synthetic sequence
cattggatttcaa

SEQ ID NO: 7807 - DNA, 13 bp, Artificial Sequence
  synthetic sequence
atattgctcctta

SEQ ID NO: 7808 - DNA, 13 bp, Artificial Sequence
  synthetic sequence
tgcacgagcctga

SEQ ID NO: 7809 - DNA, 13 bp, Artificial Sequence
  synthetic sequence
aaggaaaatcccg

SEQ ID NO: 7810 - DNA, 13 bp, Artificial Sequence
  synthetic sequence
tttgggattttgg

SEQ ID NO: 7811 - DNA, 13 bp, Artificial Sequence
  synthetic sequence
tcaccaagcctag

SEQ ID NO: 7812 - DNA, 13 bp, Artificial Sequence
  synthetic sequence
ccatcacgacgca

SEQ ID NO: 7813 - DNA, 13 bp, Artificial Sequence
  synthetic sequence
gctagtgtggaca

SEQ ID NO: 7814 - DNA, 13 bp, Artificial Sequence
  synthetic sequence
tggctataccaaa

SEQ ID NO: 7815 - DNA, 13 bp, Artificial Sequence
  synthetic sequence
ctccctaactgca

SEQ ID NO: 7816 - DNA, 13 bp, Artificial Sequence
  synthetic sequence
tcggagggaacgg

SEQ ID NO: 7817 - DNA, 13 bp, Artificial Sequence
  synthetic sequence
aagaccctagact

SEQ ID NO: 7818 - DNA, 13 bp, Artificial Sequence
  synthetic sequence
tcatcagaggctc

SEQ ID NO: 7819 - DNA, 13 bp, Artificial Sequence
  synthetic sequence
ataactatatggt

SEQ ID NO: 7820 - DNA, 13 bp, Artificial Sequence
  synthetic sequence
gtgtttttggtca

SEQ ID NO: 7821 - DNA, 13 bp, Artificial Sequence
  synthetic sequence
ccttttcctattg

SEQ ID NO: 7822 - DNA, 13 bp, Artificial Sequence
  synthetic sequence
tggatgaagccca

SEQ ID NO: 7823 - DNA, 13 bp, Artificial Sequence
  synthetic sequence
gggctttctacca

SEQ ID NO: 7824 - DNA, 13 bp, Artificial Sequence
  synthetic sequence
gggtacaaacaac

SEQ ID NO: 7825 - DNA, 13 bp, Artificial Sequence
  synthetic sequence
tacatgtacgtcc

SEQ ID NO: 7826 - DNA, 13 bp, Artificial Sequence
  synthetic sequence
tagagcagtctgc

SEQ ID NO: 7827 - DNA, 13 bp, Artificial Sequence
  synthetic sequence
ttagtagatgagc

SEQ ID NO: 7828 - DNA, 13 bp, Artificial Sequence
  synthetic sequence
ttcattgattggc

SEQ ID NO: 7829 - DNA, 13 bp, Artificial Sequence
  synthetic sequence
ctgcatcagaggg

SEQ ID NO: 7830 - DNA, 13 bp, Artificial Sequence
  synthetic sequence
gtaactacagagt

SEQ ID NO: 7831 - DNA, 13 bp, Artificial Sequence
  synthetic sequence
aatgctagtgaca

SEQ ID NO: 7832 - DNA, 13 bp, Artificial Sequence
  synthetic sequence
tggacgctgtcga

SEQ ID NO: 7833 - DNA, 13 bp, Artificial Sequence
  synthetic sequence
agagacaggaagt

SEQ ID NO: 7834 - DNA, 13 bp, Artificial Sequence
  synthetic sequence
acagccacagtcc

SEQ ID NO: 7835 - DNA, 13 bp, Artificial Sequence
  synthetic sequence
tcctctggttgga

SEQ ID NO: 7836 - DNA, 13 bp, Artificial Sequence
  synthetic sequence
cgccaggcagtaa

SEQ ID NO: 7837 - DNA, 13 bp, Artificial Sequence
  synthetic sequence
cgcaagtttcaac

SEQ ID NO: 7838 - DNA, 13 bp, Artificial Sequence
  synthetic sequence
cattgaggcactc

SEQ ID NO: 7839 - DNA, 13 bp, Artificial Sequence
  synthetic sequence
gctttactggtgg

SEQ ID NO: 7840 - DNA, 13 bp, Artificial Sequence
  synthetic sequence
ttgagaacagcta

SEQ ID NO: 7841 - DNA, 13 bp, Artificial Sequence
  synthetic sequence
agtggcaagccca

SEQ ID NO: 7842 - DNA, 13 bp, Artificial Sequence
  synthetic sequence
tattctgtcagat

SEQ ID NO: 7843 - DNA, 13 bp, Artificial Sequence
  synthetic sequence
aatccatagcgac

SEQ ID NO: 7844 - DNA, 13 bp, Artificial Sequence
  synthetic sequence
agcaacatcattg

SEQ ID NO: 7845 - DNA, 13 bp, Artificial Sequence
  synthetic sequence
cagtatctagaga

SEQ ID NO: 7846 - DNA, 13 bp, Artificial Sequence
  synthetic sequence
agtggtgctagcg

SEQ ID NO: 7847 - DNA, 13 bp, Artificial Sequence
  synthetic sequence
ccgtggcagtcca

SEQ ID NO: 7848 - DNA, 13 bp, Artificial Sequence
  synthetic sequence
aagggatcaatca

SEQ ID NO: 7849 - DNA, 13 bp, Artificial Sequence
  synthetic sequence
gttcgttacccgg

SEQ ID NO: 7850 - DNA, 13 bp, Artificial Sequence
  synthetic sequence
ccattggaaactc

SEQ ID NO: 7851 - DNA, 13 bp, Artificial Sequence
  synthetic sequence
cagccactctacg

SEQ ID NO: 7852 - DNA, 13 bp, Artificial Sequence
  synthetic sequence
agtctcagcccag

SEQ ID NO: 7853 - DNA, 13 bp, Artificial Sequence
  synthetic sequence
accaatgagacca

SEQ ID NO: 7854 - DNA, 13 bp, Artificial Sequence
  synthetic sequence
cgcaacactcagg

SEQ ID NO: 7855 - DNA, 13 bp, Artificial Sequence
  synthetic sequence
tcagggccatttc

SEQ ID NO: 7856 - DNA, 13 bp, Artificial Sequence
  synthetic sequence
gtaccttaatcaa

SEQ ID NO: 7857 - DNA, 13 bp, Artificial Sequence
  synthetic sequence
tgctaagaacagc

SEQ ID NO: 7858 - DNA, 13 bp, Artificial Sequence
  synthetic sequence
ttggagaaccaaa

SEQ ID NO: 7859 - DNA, 13 bp, Artificial Sequence
  synthetic sequence
atacatataccag

SEQ ID NO: 7860 - DNA, 13 bp, Artificial Sequence
  synthetic sequence
tcaccaagtttat

SEQ ID NO: 7861 - DNA, 13 bp, Artificial Sequence
  synthetic sequence
tggattaacttaa

SEQ ID NO: 7862 - DNA, 13 bp, Artificial Sequence
  synthetic sequence
ctcaaagagaaga

SEQ ID NO: 7863 - DNA, 13 bp, Artificial Sequence
  synthetic sequence
gaccattttgatg

SEQ ID NO: 7864 - DNA, 13 bp, Artificial Sequence
  synthetic sequence
ctgacgtgtcagt

SEQ ID NO: 7865 - DNA, 13 bp, Artificial Sequence
  synthetic sequence
agtcttctgtaac

SEQ ID NO: 7866 - DNA, 13 bp, Artificial Sequence
  synthetic sequence
ccagcccaagtgt

SEQ ID NO: 7867 - DNA, 13 bp, Artificial Sequence
  synthetic sequence
tcaggtgccaaca

SEQ ID NO: 7868 - DNA, 13 bp, Artificial Sequence
  synthetic sequence
tggtttctacagt

SEQ ID NO: 7869 - DNA, 13 bp, Artificial Sequence
  synthetic sequence
taatcagaactct

SEQ ID NO: 7870 - DNA, 13 bp, Artificial Sequence
  synthetic sequence
gcagtgtctaggg

SEQ ID NO: 7871 - DNA, 13 bp, Artificial Sequence
  synthetic sequence
agtaaatttcacc

SEQ ID NO: 7872 - DNA, 13 bp, Artificial Sequence
  synthetic sequence
tggccaatgcccg

SEQ ID NO: 7873 - DNA, 13 bp, Artificial Sequence
  synthetic sequence
gacgtatcagtga

SEQ ID NO: 7874 - DNA, 13 bp, Artificial Sequence
  synthetic sequence
aggatacagaaga

SEQ ID NO: 7875 - DNA, 13 bp, Artificial Sequence
  synthetic sequence
gggaatttcttta

SEQ ID NO: 7876 - DNA, 13 bp, Artificial Sequence
  synthetic sequence
atggggtatgctc

SEQ ID NO: 7877 - DNA, 13 bp, Artificial Sequence
  synthetic sequence
tatagggtggtga

SEQ ID NO: 7878 - DNA, 13 bp, Artificial Sequence
  synthetic sequence
gccgcaagttcca

SEQ ID NO: 7879 - DNA, 13 bp, Artificial Sequence
  synthetic sequence
atgctgttgaatt

SEQ ID NO: 7880 - DNA, 13 bp, Artificial Sequence
  synthetic sequence
agcctctattctt

SEQ ID NO: 7881 - DNA, 13 bp, Artificial Sequence
  synthetic sequence
accacacagcctg

SEQ ID NO: 7882 - DNA, 13 bp, Artificial Sequence
  synthetic sequence
ctgatgagtatgt

SEQ ID NO: 7883 - DNA, 13 bp, Artificial Sequence
  synthetic sequence
gaacctgtatgtc

SEQ ID NO: 7884 - DNA, 13 bp, Artificial Sequence
  synthetic sequence
ccacatcagtgga

SEQ ID NO: 7885 - DNA, 13 bp, Artificial Sequence
  synthetic sequence
aagatcattggaa

SEQ ID NO: 7886 - DNA, 13 bp, Artificial Sequence
  synthetic sequence
acctggcgactgt

SEQ ID NO: 7887 - DNA, 13 bp, Artificial Sequence
  synthetic sequence
agggtatacatga

SEQ ID NO: 7888 - DNA, 13 bp, Artificial Sequence
  synthetic sequence
tttaccatgaaac

SEQ ID NO: 7889 - DNA, 13 bp, Artificial Sequence
  synthetic sequence
atccattccctat

SEQ ID NO: 7890 - DNA, 13 bp, Artificial Sequence
  synthetic sequence
aacaccatagaag

SEQ ID NO: 7891 - DNA, 13 bp, Artificial Sequence
  synthetic sequence
ctattgagctagt

SEQ ID NO: 7892 - DNA, 13 bp, Artificial Sequence
  synthetic sequence
tggtgccattaga

SEQ ID NO: 7893 - DNA, 13 bp, Artificial Sequence
  synthetic sequence
agtctacaatact

SEQ ID NO: 7894 - DNA, 13 bp, Artificial Sequence
  synthetic sequence
gttaccatatagc

SEQ ID NO: 7895 - DNA, 13 bp, Artificial Sequence
  synthetic sequence
aatgctcatcgcc

SEQ ID NO: 7896 - DNA, 13 bp, Artificial Sequence
  synthetic sequence
cgccaggcggtaa

SEQ ID NO: 7897 - DNA, 13 bp, Artificial Sequence
  synthetic sequence
ccattcaaactct

SEQ ID NO: 7898 - DNA, 13 bp, Artificial Sequence
  synthetic sequence
ggcattataacca

SEQ ID NO: 7899 - DNA, 13 bp, Artificial Sequence
  synthetic sequence
aaggacattttac

SEQ ID NO: 7900 - DNA, 13 bp, Artificial Sequence
  synthetic sequence
cacaggctgctct

SEQ ID NO: 7901 - DNA, 13 bp, Artificial Sequence
  synthetic sequence
tgggacttcggat

SEQ ID NO: 7902 - DNA, 13 bp, Artificial Sequence
  synthetic sequence
tatggcactgaat

SEQ ID NO: 7903 - DNA, 13 bp, Artificial Sequence
  synthetic sequence
gtaaattccacca

SEQ ID NO: 7904 - DNA, 13 bp, Artificial Sequence
  synthetic sequence
cacactatcacga

SEQ ID NO: 7905 - DNA, 13 bp, Artificial Sequence
  synthetic sequence
agtttcaccaaac

SEQ ID NO: 7906 - DNA, 13 bp, Artificial Sequence
  synthetic sequence
gatgtgtcagtga

SEQ ID NO: 7907 - DNA, 13 bp, Artificial Sequence
  synthetic sequence
aagactggcaaag

SEQ ID NO: 7908 - DNA, 13 bp, Artificial Sequence
  synthetic sequence
ccaccgtggttgc

SEQ ID NO: 7909 - DNA, 13 bp, Artificial Sequence
  synthetic sequence
accgctccttaac

SEQ ID NO: 7910 - DNA, 13 bp, Artificial Sequence
  synthetic sequence
accaaaatgaaat

SEQ ID NO: 7911 - DNA, 13 bp, Artificial Sequence
  synthetic sequence
ttcaattaagaga

SEQ ID NO: 7912 - DNA, 13 bp, Artificial Sequence
  synthetic sequence
agtgaaacttaga

SEQ ID NO: 7913 - DNA, 13 bp, Artificial Sequence
  synthetic sequence
ggtttctaaatct

SEQ ID NO: 7914 - DNA, 13 bp, Artificial Sequence
  synthetic sequence
gttaccctcacag

SEQ ID NO: 7915 - DNA, 13 bp, Artificial Sequence
  synthetic sequence
taactgtgcaacc

SEQ ID NO: 7916 - DNA, 13 bp, Artificial Sequence
  synthetic sequence
gatgtcttaacag

SEQ ID NO: 7917 - DNA, 13 bp, Artificial Sequence
  synthetic sequence
cacattggtggga

SEQ ID NO: 7918 - DNA, 13 bp, Artificial Sequence
  synthetic sequence
gggttacagtctt

SEQ ID NO: 7919 - DNA, 13 bp, Artificial Sequence
  synthetic sequence
aaactggaagact

SEQ ID NO: 7920 - DNA, 13 bp, Artificial Sequence
  synthetic sequence
tcaaccaatgcta

SEQ ID NO: 7921 - DNA, 13 bp, Artificial Sequence
  synthetic sequence
tggtcactctcac

SEQ ID NO: 7922 - DNA, 13 bp, Artificial Sequence
  synthetic sequence
atgtcagggatct

SEQ ID NO: 7923 - DNA, 13 bp, Artificial Sequence
  synthetic sequence
ccattgggaactc

SEQ ID NO: 7924 - DNA, 13 bp, Artificial Sequence
  synthetic sequence
gaggttcgacaat

SEQ ID NO: 7925 - DNA, 13 bp, Artificial Sequence
  synthetic sequence
attaaccacactc

SEQ ID NO: 7926 - DNA, 13 bp, Artificial Sequence
  synthetic sequence
ttctcaggtgtca

SEQ ID NO: 7927 - DNA, 13 bp, Artificial Sequence
  synthetic sequence
aagttcattgact

SEQ ID NO: 7928 - DNA, 13 bp, Artificial Sequence
  synthetic sequence
ctttgctggtggc

SEQ ID NO: 7929 - DNA, 13 bp, Artificial Sequence
  synthetic sequence
tttgtcaaatggt

SEQ ID NO: 7930 - DNA, 13 bp, Artificial Sequence
  synthetic sequence
caagggtgcgaca

SEQ ID NO: 7931 - DNA, 13 bp, Artificial Sequence
  synthetic sequence
gcaaggatcccag

SEQ ID NO: 7932 - DNA, 13 bp, Artificial Sequence
  synthetic sequence
ggctggatgaaga

SEQ ID NO: 7933 - DNA, 13 bp, Artificial Sequence
  synthetic sequence
tttggtcaaaatg

SEQ ID NO: 7934 - DNA, 13 bp, Artificial Sequence
  synthetic sequence
caagtgaatcgct

SEQ ID NO: 7935 - DNA, 13 bp, Artificial Sequence
  synthetic sequence
gatgctgttgagt

SEQ ID NO: 7936 - DNA, 13 bp, Artificial Sequence
  synthetic sequence
aaggacacttcac

SEQ ID NO: 7937 - DNA, 13 bp, Artificial Sequence
  synthetic sequence
gaagctattgacc

SEQ ID NO: 7938 - DNA, 13 bp, Artificial Sequence
  synthetic sequence
gattggctcaagg

SEQ ID NO: 7939 - DNA, 13 bp, Artificial Sequence
  synthetic sequence
ttatggttagatg

SEQ ID NO: 7940 - DNA, 13 bp, Artificial Sequence
  synthetic sequence
ttacctgggaaaa

SEQ ID NO: 7941 - DNA, 13 bp, Artificial Sequence
  synthetic sequence
caacttagaagca

SEQ ID NO: 7942 - DNA, 13 bp, Artificial Sequence
  synthetic sequence
atcaggtcgatga

SEQ ID NO: 7943 - DNA, 13 bp, Artificial Sequence
  synthetic sequence
aattggtcaatgt

SEQ ID NO: 7944 - DNA, 13 bp, Artificial Sequence
  synthetic sequence
ccatacacaccat

SEQ ID NO: 7945 - DNA, 13 bp, Artificial Sequence
  synthetic sequence
accaacgccagca

SEQ ID NO: 7946 - DNA, 13 bp, Artificial Sequence
  synthetic sequence
gatggaccaagga

SEQ ID NO: 7947 - DNA, 13 bp, Artificial Sequence
  synthetic sequence
aatgaagttctac

SEQ ID NO: 7948 - DNA, 13 bp, Artificial Sequence
  synthetic sequence
ccgttggacttca

SEQ ID NO: 7949 - DNA, 13 bp, Artificial Sequence
  synthetic sequence
cctgatgaatatg

SEQ ID NO: 7950 - DNA, 13 bp, Artificial Sequence
  synthetic sequence
cttcagactctta

SEQ ID NO: 7951 - DNA, 13 bp, Artificial Sequence
  synthetic sequence
gtagggccgctaa

SEQ ID NO: 7952 - DNA, 13 bp, Artificial Sequence
  synthetic sequence
taggtatagtgtt

SEQ ID NO: 7953 - DNA, 13 bp, Artificial Sequence
  synthetic sequence
gtcagcagttggg

SEQ ID NO: 7954 - DNA, 13 bp, Artificial Sequence
  synthetic sequence
tgttgatcatgca

SEQ ID NO: 7955 - DNA, 13 bp, Artificial Sequence
  synthetic sequence
gtctggttcaggg

SEQ ID NO: 7956 - DNA, 13 bp, Artificial Sequence
  synthetic sequence
ctaagactggcaa

SEQ ID NO: 7957 - DNA, 13 bp, Artificial Sequence
  synthetic sequence
tggctgtgttgcc

SEQ ID NO: 7958 - DNA, 13 bp, Artificial Sequence
  synthetic sequence
atcagaggctcac

SEQ ID NO: 7959 - DNA, 13 bp, Artificial Sequence
  synthetic sequence
gcattattacaat

SEQ ID NO: 7960 - DNA, 13 bp, Artificial Sequence
  synthetic sequence
cccaccatgtgta

SEQ ID NO: 7961 - DNA, 13 bp, Artificial Sequence
  synthetic sequence
tccacaccagcgc

SEQ ID NO: 7962 - DNA, 13 bp, Artificial Sequence
  synthetic sequence
caactttggcctg

SEQ ID NO: 7963 - DNA, 13 bp, Artificial Sequence
  synthetic sequence
cagcctaaatgac

SEQ ID NO: 7964 - DNA, 13 bp, Artificial Sequence
  synthetic sequence
agagacgatcacc

SEQ ID NO: 7965 - DNA, 13 bp, Artificial Sequence
  synthetic sequence
actggcatcataa

SEQ ID NO: 7966 - DNA, 13 bp, Artificial Sequence
  synthetic sequence
tatcctttcccaa

SEQ ID NO: 7967 - DNA, 13 bp, Artificial Sequence
  synthetic sequence
accaccgctcagg

SEQ ID NO: 7968 - DNA, 13 bp, Artificial Sequence
  synthetic sequence
gatcaacaacatc

SEQ ID NO: 7969 - DNA, 13 bp, Artificial Sequence
  synthetic sequence
gacatcactaagt

SEQ ID NO: 7970 - DNA, 13 bp, Artificial Sequence
  synthetic sequence
aagaggcttcttg

SEQ ID NO: 7971 - DNA, 13 bp, Artificial Sequence
  synthetic sequence
aaggagactggca

SEQ ID NO: 7972 - DNA, 13 bp, Artificial Sequence
  synthetic sequence
ctgggcgtaatgg

SEQ ID NO: 7973 - DNA, 13 bp, Artificial Sequence
  synthetic sequence
gttgacagtgaag

SEQ ID NO: 7974 - DNA, 13 bp, Artificial Sequence
  synthetic sequence
accctgtcatgga

SEQ ID NO: 7975 - DNA, 13 bp, Artificial Sequence
  synthetic sequence
agatgccaacacg

SEQ ID NO: 7976 - DNA, 13 bp, Artificial Sequence
  synthetic sequence
tacatgtacgtgc

SEQ ID NO: 7977 - DNA, 13 bp, Artificial Sequence
  synthetic sequence
gccatctatgtgg

SEQ ID NO: 7978 - DNA, 13 bp, Artificial Sequence
  synthetic sequence
cctaacaacatga

SEQ ID NO: 7979 - DNA, 13 bp, Artificial Sequence
  synthetic sequence
ggaaattcccgga

SEQ ID NO: 7980 - DNA, 13 bp, Artificial Sequence
  synthetic sequence
gttgtacagtatg

SEQ ID NO: 7981 - DNA, 13 bp, Artificial Sequence
  synthetic sequence
gggaaaatgttaa

SEQ ID NO: 7982 - DNA, 13 bp, Artificial Sequence
  synthetic sequence
atatgagaatcaa

SEQ ID NO: 7983 - DNA, 13 bp, Artificial Sequence
  synthetic sequence
gtgacatctgttg

SEQ ID NO: 7984 - DNA, 13 bp, Artificial Sequence
  synthetic sequence
tggtatcagacaa

SEQ ID NO: 7985 - DNA, 13 bp, Artificial Sequence
  synthetic sequence
tatgggattttgg

SEQ ID NO: 7986 - DNA, 13 bp, Artificial Sequence
  synthetic sequence
caatctgctgctt

SEQ ID NO: 7987 - DNA, 13 bp, Artificial Sequence
  synthetic sequence
aaagccattcaac

SEQ ID NO: 7988 - DNA, 13 bp, Artificial Sequence
  synthetic sequence
cacaagaagctgc

SEQ ID NO: 7989 - DNA, 13 bp, Artificial Sequence
  synthetic sequence
ggcgcttggatgc

SEQ ID NO: 7990 - DNA, 13 bp, Artificial Sequence
  synthetic sequence
caccagctcaagt

SEQ ID NO: 7991 - DNA, 13 bp, Artificial Sequence
  synthetic sequence
taataccatggat

SEQ ID NO: 7992 - DNA, 13 bp, Artificial Sequence
  synthetic sequence
catcatagtgcca

SEQ ID NO: 7993 - DNA, 13 bp, Artificial Sequence
  synthetic sequence
gtgatgcagtcta

SEQ ID NO: 7994 - DNA, 13 bp, Artificial Sequence
  synthetic sequence
ttgattcacatcc

SEQ ID NO: 7995 - DNA, 13 bp, Artificial Sequence
  synthetic sequence
gcacaaaagcaga

SEQ ID NO: 7996 - DNA, 13 bp, Artificial Sequence
  synthetic sequence
tatgatgcaagcc

SEQ ID NO: 7997 - DNA, 13 bp, Artificial Sequence
  synthetic sequence
tgaagagagggtt

SEQ ID NO: 7998 - DNA, 13 bp, Artificial Sequence
  synthetic sequence
acatacctggtga

SEQ ID NO: 7999 - DNA, 13 bp, Artificial Sequence
  synthetic sequence
accacccagccag

SEQ ID NO: 8000 - DNA, 13 bp, Artificial Sequence
  synthetic sequence
agggatgtgacac

SEQ ID NO: 8001 - DNA, 13 bp, Artificial Sequence
  synthetic sequence
aagcaaaccctca

SEQ ID NO: 8002 - DNA, 13 bp, Artificial Sequence
  synthetic sequence
caaagccatccaa

SEQ ID NO: 8003 - DNA, 13 bp, Artificial Sequence
  synthetic sequence
gtgttagatgccg

SEQ ID NO: 8004 - DNA, 13 bp, Artificial Sequence
  synthetic sequence
cagccactgtacg

SEQ ID NO: 8005 - DNA, 13 bp, Artificial Sequence
  synthetic sequence
caaatttaccccc

SEQ ID NO: 8006 - DNA, 13 bp, Artificial Sequence
  synthetic sequence
attagccgcattc

SEQ ID NO: 8007 - DNA, 13 bp, Artificial Sequence
  synthetic sequence
cacccaaagtagt

SEQ ID NO: 8008 - DNA, 13 bp, Artificial Sequence
  synthetic sequence
tgaactgcatgta

SEQ ID NO: 8009 - DNA, 13 bp, Artificial Sequence
  synthetic sequence
tgtacatcatggt

SEQ ID NO: 8010 - DNA, 13 bp, Artificial Sequence
  synthetic sequence
acagaagtgcttg

SEQ ID NO: 8011 - DNA, 13 bp, Artificial Sequence
  synthetic sequence
ggcattccaccaa

SEQ ID NO: 8012 - DNA, 13 bp, Artificial Sequence
  synthetic sequence
caaacatgaatgt

SEQ ID NO: 8013 - DNA, 13 bp, Artificial Sequence
  synthetic sequence
gacatatcctggc

SEQ ID NO: 8014 - DNA, 13 bp, Artificial Sequence
  synthetic sequence
gtttctcgaagta

SEQ ID NO: 8015 - DNA, 13 bp, Artificial Sequence
  synthetic sequence
acactcctttctc

SEQ ID NO: 8016 - DNA, 13 bp, Artificial Sequence
  synthetic sequence
tcaaagtacccag

SEQ ID NO: 8017 - DNA, 13 bp, Artificial Sequence
  synthetic sequence
tggcccaagattt

SEQ ID NO: 8018 - DNA, 13 bp, Artificial Sequence
  synthetic sequence
ccaatttcttctc

SEQ ID NO: 8019 - DNA, 13 bp, Artificial Sequence
  synthetic sequence
catcataaaacca

SEQ ID NO: 8020 - DNA, 13 bp, Artificial Sequence
  synthetic sequence
tatttgtcagcaa

SEQ ID NO: 8021 - DNA, 13 bp, Artificial Sequence
  synthetic sequence
gctccaatttggt

SEQ ID NO: 8022 - DNA, 13 bp, Artificial Sequence
  synthetic sequence
ctgcatatttcca

SEQ ID NO: 8023 - DNA, 13 bp, Artificial Sequence
  synthetic sequence
cctcccacacaag

SEQ ID NO: 8024 - DNA, 13 bp, Artificial Sequence
  synthetic sequence
tgtggtgacttct

SEQ ID NO: 8025 - DNA, 13 bp, Artificial Sequence
  synthetic sequence
cttgtgaccccat

SEQ ID NO: 8026 - DNA, 13 bp, Artificial Sequence
  synthetic sequence
caatagctctgtt

SEQ ID NO: 8027 - DNA, 13 bp, Artificial Sequence
  synthetic sequence
ctgatggcatctg

SEQ ID NO: 8028 - DNA, 13 bp, Artificial Sequence
  synthetic sequence
gatttctcagagg

SEQ ID NO: 8029 - DNA, 13 bp, Artificial Sequence
  synthetic sequence
ccagtggagacaa

SEQ ID NO: 8030 - DNA, 13 bp, Artificial Sequence
  synthetic sequence
catccataacagt

SEQ ID NO: 8031 - DNA, 13 bp, Artificial Sequence
  synthetic sequence
gtggaatagggca

SEQ ID NO: 8032 - DNA, 13 bp, Artificial Sequence
  synthetic sequence
tcctctgagtagc

SEQ ID NO: 8033 - DNA, 13 bp, Artificial Sequence
  synthetic sequence
tccccataggcta

SEQ ID NO: 8034 - DNA, 13 bp, Artificial Sequence
  synthetic sequence
aattcagcatcaa

SEQ ID NO: 8035 - DNA, 13 bp, Artificial Sequence
  synthetic sequence
tcattaaacttct

SEQ ID NO: 8036 - DNA, 13 bp, Artificial Sequence
  synthetic sequence
cacgtaagggtgc

SEQ ID NO: 8037 - DNA, 13 bp, Artificial Sequence
  synthetic sequence
tcatgggcatggt

SEQ ID NO: 8038 - DNA, 13 bp, Artificial Sequence
  synthetic sequence
gggctgcatctct

SEQ ID NO: 8039 - DNA, 13 bp, Artificial Sequence
  synthetic sequence
tctgtcacctcta

SEQ ID NO: 8040 - DNA, 13 bp, Artificial Sequence
  synthetic sequence
aacacatcatctc

SEQ ID NO: 8041 - DNA, 13 bp, Artificial Sequence
  synthetic sequence
tcaccaagttctt

SEQ ID NO: 8042 - DNA, 13 bp, Artificial Sequence
  synthetic sequence
catgacacccaat

SEQ ID NO: 8043 - DNA, 13 bp, Artificial Sequence
  synthetic sequence
cagatgggttggt

SEQ ID NO: 8044 - DNA, 13 bp, Artificial Sequence
  synthetic sequence
gtgggagcaccaa

SEQ ID NO: 8045 - DNA, 13 bp, Artificial Sequence
  synthetic sequence
cactataggggta

SEQ ID NO: 8046 - DNA, 13 bp, Artificial Sequence
  synthetic sequence
cactggcaaagta

SEQ ID NO: 8047 - DNA, 13 bp, Artificial Sequence
  synthetic sequence
cagcaagcatgag

SEQ ID NO: 8048 - DNA, 13 bp, Artificial Sequence
  synthetic sequence
ctggaattatcca

SEQ ID NO: 8049 - DNA, 13 bp, Artificial Sequence
  synthetic sequence
ttcccattatgcc

SEQ ID NO: 8050 - DNA, 13 bp, Artificial Sequence
  synthetic sequence
gtgtgagttccaa

SEQ ID NO: 8051 - DNA, 13 bp, Artificial Sequence
  synthetic sequence
gctgtgattctgt

SEQ ID NO: 8052 - DNA, 13 bp, Artificial Sequence
  synthetic sequence
tggtaccaggttt

SEQ ID NO: 8053 - DNA, 13 bp, Artificial Sequence
  synthetic sequence
tagtggaactgag

SEQ ID NO: 8054 - DNA, 13 bp, Artificial Sequence
  synthetic sequence
tcagtgttgatga

SEQ ID NO: 8055 - DNA, 13 bp, Artificial Sequence
  synthetic sequence
aaggcagcacata

SEQ ID NO: 8056 - DNA, 13 bp, Artificial Sequence
  synthetic sequence
aacaaagcttgct

SEQ ID NO: 8057 - DNA, 13 bp, Artificial Sequence
  synthetic sequence
ctaaggtagactg

SEQ ID NO: 8058 - DNA, 13 bp, Artificial Sequence
  synthetic sequence
tcaaatgcaaaga

SEQ ID NO: 8059 - DNA, 13 bp, Artificial Sequence
  synthetic sequence
gatcactgtaacc

SEQ ID NO: 8060 - DNA, 13 bp, Artificial Sequence
  synthetic sequence
caaacatagcttc

SEQ ID NO: 8061 - DNA, 13 bp, Artificial Sequence
  synthetic sequence
ttatcttgtctct

SEQ ID NO: 8062 - DNA, 13 bp, Artificial Sequence
  synthetic sequence
ctggtacaacacc

SEQ ID NO: 8063 - DNA, 13 bp, Artificial Sequence
  synthetic sequence
atggctgtctcct

SEQ ID NO: 8064 - DNA, 13 bp, Artificial Sequence
  synthetic sequence
gtttttcctggtt

SEQ ID NO: 8065 - DNA, 13 bp, Artificial Sequence
  synthetic sequence
ttcaggttgttta

SEQ ID NO: 8066 - DNA, 13 bp, Artificial Sequence
  synthetic sequence
cacatgggagcta

SEQ ID NO: 8067 - DNA, 13 bp, Artificial Sequence
  synthetic sequence
acatactcaggca

SEQ ID NO: 8068 - DNA, 13 bp, Artificial Sequence
  synthetic sequence
ggtgtcattgtca

SEQ ID NO: 8069 - DNA, 13 bp, Artificial Sequence
  synthetic sequence
gggataaggcaaa

SEQ ID NO: 8070 - DNA, 13 bp, Artificial Sequence
  synthetic sequence
tctaattgcttta

SEQ ID NO: 8071 - DNA, 13 bp, Artificial Sequence
  synthetic sequence
tgttcatatatgg

SEQ ID NO: 8072 - DNA, 13 bp, Artificial Sequence
  synthetic sequence
caattgcacctag

SEQ ID NO: 8073 - DNA, 13 bp, Artificial Sequence
  synthetic sequence
tccccttgtatat

SEQ ID NO: 8074 - DNA, 13 bp, Artificial Sequence
  synthetic sequence
tctgtgtacccgt

SEQ ID NO: 8075 - DNA, 13 bp, Artificial Sequence
  synthetic sequence
caccgaggccttt

SEQ ID NO: 8076 - DNA, 13 bp, Artificial Sequence
  synthetic sequence
gtttggtcaatca

SEQ ID NO: 8077 - DNA, 13 bp, Artificial Sequence
  synthetic sequence
ttttccctggttg

SEQ ID NO: 8078 - DNA, 13 bp, Artificial Sequence
  synthetic sequence
ggtgtcattgtta

SEQ ID NO: 8079 - DNA, 13 bp, Artificial Sequence
  synthetic sequence
aatctgtgactac

SEQ ID NO: 8080 - DNA, 13 bp, Artificial Sequence
  synthetic sequence
cctccatgctcat

SEQ ID NO: 8081 - DNA, 13 bp, Artificial Sequence
  synthetic sequence
ttaacataaccat

SEQ ID NO: 8082 - DNA, 13 bp, Artificial Sequence
  synthetic sequence
gcaagcataagat

SEQ ID NO: 8083 - DNA, 13 bp, Artificial Sequence
  synthetic sequence
ttagctctgacac

SEQ ID NO: 8084 - DNA, 13 bp, Artificial Sequence
  synthetic sequence
ttcccattgtgcc

SEQ ID NO: 8085 - DNA, 13 bp, Artificial Sequence
  synthetic sequence
tggttcaacacac

SEQ ID NO: 8086 - DNA, 13 bp, Artificial Sequence
  synthetic sequence
ggttgttcaagaa

SEQ ID NO: 8087 - DNA, 13 bp, Artificial Sequence
  synthetic sequence
agcattgctgtga

SEQ ID NO: 8088 - DNA, 13 bp, Artificial Sequence
  synthetic sequence
gctatagtgactg

SEQ ID NO: 8089 - DNA, 13 bp, Artificial Sequence
  synthetic sequence
aaataacatagac

SEQ ID NO: 8090 - DNA, 13 bp, Artificial Sequence
  synthetic sequence
ccgagtacgtact

SEQ ID NO: 8091 - DNA, 13 bp, Artificial Sequence
  synthetic sequence
catctttcacata

SEQ ID NO: 8092 - DNA, 13 bp, Artificial Sequence
  synthetic sequence
gaatcaaaaggga

SEQ ID NO: 8093 - DNA, 13 bp, Artificial Sequence
  synthetic sequence
cagtgaagcccat

SEQ ID NO: 8094 - DNA, 13 bp, Artificial Sequence
  synthetic sequence
tctgcaccgacac

SEQ ID NO: 8095 - DNA, 13 bp, Artificial Sequence
  synthetic sequence
tcaccaggttctt

SEQ ID NO: 8096 - DNA, 13 bp, Artificial Sequence
  synthetic sequence
ttaccaaacatgg

SEQ ID NO: 8097 - DNA, 13 bp, Artificial Sequence
  synthetic sequence
ccataggctataa

SEQ ID NO: 8098 - DNA, 13 bp, Artificial Sequence
  synthetic sequence
ccaattccttctc

SEQ ID NO: 8099 - DNA, 13 bp, Artificial Sequence
  synthetic sequence
acatcatctccat

SEQ ID NO: 8100 - DNA, 13 bp, Artificial Sequence
  synthetic sequence
tcttaacacccaa

SEQ ID NO: 8101 - DNA, 13 bp, Artificial Sequence
  synthetic sequence
ttcccgaagtagt

SEQ ID NO: 8102 - DNA, 13 bp, Artificial Sequence
  synthetic sequence
taatttgggttgg

SEQ ID NO: 8103 - DNA, 13 bp, Artificial Sequence
  synthetic sequence
ggttggtggctgt

SEQ ID NO: 8104 - DNA, 13 bp, Artificial Sequence
  synthetic sequence
tcaaagggatccc

SEQ ID NO: 8105 - DNA, 13 bp, Artificial Sequence
  synthetic sequence
ccggtttgacaat

SEQ ID NO: 8106 - DNA, 13 bp, Artificial Sequence
  synthetic sequence
tcaaatgcaaaaa

SEQ ID NO: 8107 - DNA, 13 bp, Artificial Sequence
  synthetic sequence
cagtgaaacccat

SEQ ID NO: 8108 - DNA, 13 bp, Artificial Sequence
  synthetic sequence
atcttgtccctac

SEQ ID NO: 8109 - DNA, 13 bp, Artificial Sequence
  synthetic sequence
gtagtgagaaact

SEQ ID NO: 8110 - DNA, 13 bp, Artificial Sequence
  synthetic sequence
aaggcaaaatcta

SEQ ID NO: 8111 - DNA, 13 bp, Artificial Sequence
  synthetic sequence
ctaaaagtgccca

SEQ ID NO: 8112 - DNA, 13 bp, Artificial Sequence
  synthetic sequence
ccatcgtaaaacc

SEQ ID NO: 8113 - DNA, 13 bp, Artificial Sequence
  synthetic sequence
attggtaacttgc

SEQ ID NO: 8114 - DNA, 13 bp, Artificial Sequence
  synthetic sequence
aacattgagggca

SEQ ID NO: 8115 - DNA, 13 bp, Artificial Sequence
  synthetic sequence
tgttgatcactag

SEQ ID NO: 8116 - DNA, 13 bp, Artificial Sequence
  synthetic sequence
aacacactgggtt

SEQ ID NO: 8117 - DNA, 13 bp, Artificial Sequence
  synthetic sequence
atgcccgtagcaa

SEQ ID NO: 8118 - DNA, 13 bp, Artificial Sequence
  synthetic sequence
gccacaatatatg

SEQ ID NO: 8119 - DNA, 13 bp, Artificial Sequence
  synthetic sequence
gatcgatacaagt

SEQ ID NO: 8120 - DNA, 13 bp, Artificial Sequence
  synthetic sequence
attgtggggtgga

SEQ ID NO: 8121 - DNA, 13 bp, Artificial Sequence
  synthetic sequence
cagggttctgaca

SEQ ID NO: 8122 - DNA, 13 bp, Artificial Sequence
  synthetic sequence
tagagtggtggtt

SEQ ID NO: 8123 - DNA, 13 bp, Artificial Sequence
  synthetic sequence
ttgaacttcttca

SEQ ID NO: 8124 - DNA, 13 bp, Artificial Sequence
  synthetic sequence
gagctaagtacga

SEQ ID NO: 8125 - DNA, 13 bp, Artificial Sequence
  synthetic sequence
aagattgcttaga

SEQ ID NO: 8126 - DNA, 13 bp, Artificial Sequence
  synthetic sequence
tggctacaacaaa

SEQ ID NO: 8127 - DNA, 13 bp, Artificial Sequence
  synthetic sequence
tgtcacagtccat

SEQ ID NO: 8128 - DNA, 13 bp, Artificial Sequence
  synthetic sequence
ttagaattacagt

SEQ ID NO: 8129 - DNA, 13 bp, Artificial Sequence
  synthetic sequence
tcaaaatcaacct

SEQ ID NO: 8130 - DNA, 13 bp, Artificial Sequence
  synthetic sequence
tgttctgtgtgcc

SEQ ID NO: 8131 - DNA, 13 bp, Artificial Sequence
  synthetic sequence
ttatagatgacat

SEQ ID NO: 8132 - DNA, 13 bp, Artificial Sequence
  synthetic sequence
cgaagtccaaact

SEQ ID NO: 8133 - DNA, 13 bp, Artificial Sequence
  synthetic sequence
gagaatagggcct

SEQ ID NO: 8134 - DNA, 13 bp, Artificial Sequence
  synthetic sequence
ttctcattggtgt

SEQ ID NO: 8135 - DNA, 13 bp, Artificial Sequence
  synthetic sequence
acttcatacaggt

SEQ ID NO: 8136 - DNA, 13 bp, Artificial Sequence
  synthetic sequence
tgctcactagcaa

SEQ ID NO: 8137 - DNA, 13 bp, Artificial Sequence
  synthetic sequence
gagggacgtatcc

SEQ ID NO: 8138 - DNA, 13 bp, Artificial Sequence
  synthetic sequence
cgtgcacgcaaaa

SEQ ID NO: 8139 - DNA, 13 bp, Artificial Sequence
  synthetic sequence
cgttccacattgg

SEQ ID NO: 8140 - DNA, 13 bp, Artificial Sequence
  synthetic sequence
cgtctgcgaatcg

SEQ ID NO: 8141 - DNA, 13 bp, Artificial Sequence
  synthetic sequence
ccagtggactaca

SEQ ID NO: 8142 - DNA, 13 bp, Artificial Sequence
  synthetic sequence
ctgagtcaaaagg

SEQ ID NO: 8143 - DNA, 13 bp, Artificial Sequence
  synthetic sequence
tcaggtactatcc

SEQ ID NO: 8144 - DNA, 13 bp, Artificial Sequence
  synthetic sequence
tctctactagtgc

SEQ ID NO: 8145 - DNA, 13 bp, Artificial Sequence
  synthetic sequence
aaacaccatcatc

SEQ ID NO: 8146 - DNA, 13 bp, Artificial Sequence
  synthetic sequence
ctatgagtgatat

SEQ ID NO: 8147 - DNA, 13 bp, Artificial Sequence
  synthetic sequence
cattatgcgtggc

SEQ ID NO: 8148 - DNA, 13 bp, Artificial Sequence
  synthetic sequence
cctttgaatcctt

SEQ ID NO: 8149 - DNA, 13 bp, Artificial Sequence
  synthetic sequence
taacttccaggat

SEQ ID NO: 8150 - DNA, 13 bp, Artificial Sequence
  synthetic sequence
tccatactcatct

SEQ ID NO: 8151 - DNA, 13 bp, Artificial Sequence
  synthetic sequence
ctctcttcagtcc

SEQ ID NO: 8152 - DNA, 13 bp, Artificial Sequence
  synthetic sequence
acttttcgttggt

SEQ ID NO: 8153 - DNA, 13 bp, Artificial Sequence
  synthetic sequence
gccacgatatatg

SEQ ID NO: 8154 - DNA, 13 bp, Artificial Sequence
  synthetic sequence
gctttgatccatg

SEQ ID NO: 8155 - DNA, 13 bp, Artificial Sequence
  synthetic sequence
ctggtacaacgcc

SEQ ID NO: 8156 - DNA, 13 bp, Artificial Sequence
  synthetic sequence
atgcatccttgta

SEQ ID NO: 8157 - DNA, 13 bp, Artificial Sequence
  synthetic sequence
ctcctgcgatagt

SEQ ID NO: 8158 - DNA, 13 bp, Artificial Sequence
  synthetic sequence
aaagtcattctaa

SEQ ID NO: 8159 - DNA, 13 bp, Artificial Sequence
  synthetic sequence
cacacactagtgg

SEQ ID NO: 8160 - DNA, 13 bp, Artificial Sequence
  synthetic sequence
atgggaatctcag

SEQ ID NO: 8161 - DNA, 13 bp, Artificial Sequence
  synthetic sequence
tgctctgtaccga

SEQ ID NO: 8162 - DNA, 13 bp, Artificial Sequence
  synthetic sequence
gaaacccagcaaa

SEQ ID NO: 8163 - DNA, 13 bp, Artificial Sequence
  synthetic sequence
caaaccccacaag

SEQ ID NO: 8164 - DNA, 13 bp, Artificial Sequence
  synthetic sequence
tagtgtgtgttgc

SEQ ID NO: 8165 - DNA, 13 bp, Artificial Sequence
  synthetic sequence
ttctcttccagtg

SEQ ID NO: 8166 - DNA, 13 bp, Artificial Sequence
  synthetic sequence
catagagatgccc

SEQ ID NO: 8167 - DNA, 13 bp, Artificial Sequence
  synthetic sequence
ttgcccagtcgtt

SEQ ID NO: 8168 - DNA, 13 bp, Artificial Sequence
  synthetic sequence
gacaaggcaaagt

SEQ ID NO: 8169 - DNA, 13 bp, Artificial Sequence
  synthetic sequence
tggaattgaagat

SEQ ID NO: 8170 - DNA, 13 bp, Artificial Sequence
  synthetic sequence
ccatgtcattgaa

SEQ ID NO: 8171 - DNA, 13 bp, Artificial Sequence
  synthetic sequence
cactaatggcatc

SEQ ID NO: 8172 - DNA, 13 bp, Artificial Sequence
  synthetic sequence
agtgaacctgacc

SEQ ID NO: 8173 - DNA, 13 bp, Artificial Sequence
  synthetic sequence
cgacaaatgtgaa

SEQ ID NO: 8174 - DNA, 13 bp, Artificial Sequence
  synthetic sequence
tccgcaggcacat

SEQ ID NO: 8175 - DNA, 13 bp, Artificial Sequence
  synthetic sequence
cactataagggta

SEQ ID NO: 8176 - DNA, 13 bp, Artificial Sequence
  synthetic sequence
tctgggttttgac

SEQ ID NO: 8177 - DNA, 13 bp, Artificial Sequence
  synthetic sequence
tgctggtgcattt

SEQ ID NO: 8178 - DNA, 13 bp, Artificial Sequence
  synthetic sequence
ctagcacgtaagg

SEQ ID NO: 8179 - DNA, 13 bp, Artificial Sequence
  synthetic sequence
tcttccatgctca

SEQ ID NO: 8180 - DNA, 13 bp, Artificial Sequence
  synthetic sequence
ctaacacatcatc

SEQ ID NO: 8181 - DNA, 13 bp, Artificial Sequence
  synthetic sequence
tggtagggtggat

SEQ ID NO: 8182 - DNA, 13 bp, Artificial Sequence
  synthetic sequence
cgaaagcatcacc

SEQ ID NO: 8183 - DNA, 13 bp, Artificial Sequence
  synthetic sequence
gtgccctatagtg

SEQ ID NO: 8184 - DNA, 13 bp, Artificial Sequence
  synthetic sequence
agctgcaataata

SEQ ID NO: 8185 - DNA, 13 bp, Artificial Sequence
  synthetic sequence
attggtatctagc

SEQ ID NO: 8186 - DNA, 13 bp, Artificial Sequence
  synthetic sequence
tcatgtatggaac

SEQ ID NO: 8187 - DNA, 13 bp, Artificial Sequence
  synthetic sequence
tgacacagcctcc

SEQ ID NO: 8188 - DNA, 13 bp, Artificial Sequence
  synthetic sequence
atggtctccactc

SEQ ID NO: 8189 - DNA, 13 bp, Artificial Sequence
  synthetic sequence
tccctcatgggca

SEQ ID NO: 8190 - DNA, 13 bp, Artificial Sequence
  synthetic sequence
gtttcccacatac

SEQ ID NO: 8191 - DNA, 13 bp, Artificial Sequence
  synthetic sequence
ctcatgtgacccg

SEQ ID NO: 8192 - DNA, 13 bp, Artificial Sequence
  synthetic sequence
tagccatatcatt

SEQ ID NO: 8193 - DNA, 13 bp, Artificial Sequence
  synthetic sequence
atttcagatgtgg

SEQ ID NO: 8194 - DNA, 13 bp, Artificial Sequence
  synthetic sequence
gctgggtagtact

SEQ ID NO: 8195 - DNA, 13 bp, Artificial Sequence
  synthetic sequence
agtgtgagttcta

SEQ ID NO: 8196 - DNA, 13 bp, Artificial Sequence
  synthetic sequence
agttgcaatagta

SEQ ID NO: 8197 - DNA, 13 bp, Artificial Sequence
  synthetic sequence
taccattgtgcca

SEQ ID NO: 8198 - DNA, 13 bp, Artificial Sequence
  synthetic sequence
taactcctcttca

SEQ ID NO: 8199 - DNA, 13 bp, Artificial Sequence
  synthetic sequence
tcttccaatgatg

SEQ ID NO: 8200 - DNA, 13 bp, Artificial Sequence
  synthetic sequence
gctgccaaagcca

SEQ ID NO: 8201 - DNA, 13 bp, Artificial Sequence
  synthetic sequence
ggtgacttgtcag

SEQ ID NO: 8202 - DNA, 13 bp, Artificial Sequence
  synthetic sequence
caacgcagccact

SEQ ID NO: 8203 - DNA, 13 bp, Artificial Sequence
  synthetic sequence
ctttgatatagtc

SEQ ID NO: 8204 - DNA, 13 bp, Artificial Sequence
  synthetic sequence
tcgagccaattgc

SEQ ID NO: 8205 - DNA, 13 bp, Artificial Sequence
  synthetic sequence
cactgtatgggta

SEQ ID NO: 8206 - DNA, 13 bp, Artificial Sequence
  synthetic sequence
cactatagccaca

SEQ ID NO: 8207 - DNA, 13 bp, Artificial Sequence
  synthetic sequence
agtttgccaagcg

SEQ ID NO: 8208 - DNA, 13 bp, Artificial Sequence
  synthetic sequence
gagggcatgtgct

SEQ ID NO: 8209 - DNA, 13 bp, Artificial Sequence
  synthetic sequence
ctgtgtctgggca

SEQ ID NO: 8210 - DNA, 13 bp, Artificial Sequence
  synthetic sequence
tctcaacagctcc

SEQ ID NO: 8211 - DNA, 13 bp, Artificial Sequence
  synthetic sequence
cactggcgaagta

SEQ ID NO: 8212 - DNA, 13 bp, Artificial Sequence
  synthetic sequence
tccggggaaacag

SEQ ID NO: 8213 - DNA, 13 bp, Artificial Sequence
  synthetic sequence
tctgtgttttgtg

SEQ ID NO: 8214 - DNA, 13 bp, Artificial Sequence
  synthetic sequence
cattgccaaacat

SEQ ID NO: 8215 - DNA, 13 bp, Artificial Sequence
  synthetic sequence
aaccactggtatg

SEQ ID NO: 8216 - DNA, 13 bp, Artificial Sequence
  synthetic sequence
cgtgttggaccat

SEQ ID NO: 8217 - DNA, 13 bp, Artificial Sequence
  synthetic sequence
ctctattgaggtg

SEQ ID NO: 8218 - DNA, 13 bp, Artificial Sequence
  synthetic sequence
cccaatcattgtg

SEQ ID NO: 8219 - DNA, 13 bp, Artificial Sequence
  synthetic sequence
gttgttttctgtg

SEQ ID NO: 8220 - DNA, 13 bp, Artificial Sequence
  synthetic sequence
atcatgtctgcaa

SEQ ID NO: 8221 - DNA, 13 bp, Artificial Sequence
  synthetic sequence
cacccaatcaggg

SEQ ID NO: 8222 - DNA, 13 bp, Artificial Sequence
  synthetic sequence
caaatgtaaactc

SEQ ID NO: 8223 - DNA, 13 bp, Artificial Sequence
  synthetic sequence
ttgtagataacat

SEQ ID NO: 8224 - DNA, 13 bp, Artificial Sequence
  synthetic sequence
gctggcttctctt

SEQ ID NO: 8225 - DNA, 13 bp, Artificial Sequence
  synthetic sequence
tcttcaggatctt

SEQ ID NO: 8226 - DNA, 13 bp, Artificial Sequence
  synthetic sequence
gactgcatctttt

SEQ ID NO: 8227 - DNA, 13 bp, Artificial Sequence
  synthetic sequence
cagcattagccat

SEQ ID NO: 8228 - DNA, 13 bp, Artificial Sequence
  synthetic sequence
agttggtgtctca

SEQ ID NO: 8229 - DNA, 13 bp, Artificial Sequence
  synthetic sequence
gaataggtaaaca

SEQ ID NO: 8230 - DNA, 13 bp, Artificial Sequence
  synthetic sequence
actcgcccgtttt

SEQ ID NO: 8231 - DNA, 13 bp, Artificial Sequence
  synthetic sequence
gctctgttgcaca

SEQ ID NO: 8232 - DNA, 13 bp, Artificial Sequence
  synthetic sequence
ccagtctggcagt

SEQ ID NO: 8233 - DNA, 13 bp, Artificial Sequence
  synthetic sequence
attgaagatagaa

SEQ ID NO: 8234 - DNA, 13 bp, Artificial Sequence
  synthetic sequence
gctctataatgtg

SEQ ID NO: 8235 - DNA, 13 bp, Artificial Sequence
  synthetic sequence
tgactgtgaccac

SEQ ID NO: 8236 - DNA, 13 bp, Artificial Sequence
  synthetic sequence
ctgggatgatcca

SEQ ID NO: 8237 - DNA, 13 bp, Artificial Sequence
  synthetic sequence
agcacgtactcgg

SEQ ID NO: 8238 - DNA, 13 bp, Artificial Sequence
  synthetic sequence
aatttttcgttgg

SEQ ID NO: 8239 - DNA, 13 bp, Artificial Sequence
  synthetic sequence
gcatcccaccaag

SEQ ID NO: 8240 - DNA, 13 bp, Artificial Sequence
  synthetic sequence
attgtcttcccag

SEQ ID NO: 8241 - DNA, 13 bp, Artificial Sequence
  synthetic sequence
tctaagctcatcc

SEQ ID NO: 8242 - DNA, 13 bp, Artificial Sequence
  synthetic sequence
tggccattcacca

SEQ ID NO: 8243 - DNA, 13 bp, Artificial Sequence
  synthetic sequence
agtctgtcacttc

SEQ ID NO: 8244 - DNA, 13 bp, Artificial Sequence
  synthetic sequence
tttgggttagtct

SEQ ID NO: 8245 - DNA, 13 bp, Artificial Sequence
  synthetic sequence
cacatcatctccg

SEQ ID NO: 8246 - DNA, 13 bp, Artificial Sequence
  synthetic sequence
ttccacctgtaga

SEQ ID NO: 8247 - DNA, 13 bp, Artificial Sequence
  synthetic sequence
tatcagcaatagc

SEQ ID NO: 8248 - DNA, 13 bp, Artificial Sequence
  synthetic sequence
cacacacctggtc

SEQ ID NO: 8249 - DNA, 13 bp, Artificial Sequence
  synthetic sequence
gtgatacagcttc

SEQ ID NO: 8250 - DNA, 13 bp, Artificial Sequence
  synthetic sequence
gtgaactcagcgt

SEQ ID NO: 8251 - DNA, 13 bp, Artificial Sequence
  synthetic sequence
ccagatttctggt

SEQ ID NO: 8252 - DNA, 13 bp, Artificial Sequence
  synthetic sequence
ggtataagtagtg

SEQ ID NO: 8253 - DNA, 13 bp, Artificial Sequence
  synthetic sequence
agggcaaaatcta

SEQ ID NO: 8254 - DNA, 13 bp, Artificial Sequence
  synthetic sequence
tgtttaaaaactc

SEQ ID NO: 8255 - DNA, 13 bp, Artificial Sequence
  synthetic sequence
aactgattagtgc

SEQ ID NO: 8256 - DNA, 13 bp, Artificial Sequence
  synthetic sequence
gacacatttccaa

SEQ ID NO: 8257 - DNA, 13 bp, Artificial Sequence
  synthetic sequence
taggccaccatgt

SEQ ID NO: 8258 - DNA, 13 bp, Artificial Sequence
  synthetic sequence
tgatagctctgtt

SEQ ID NO: 8259 - DNA, 13 bp, Artificial Sequence
  synthetic sequence
cagaccattgagt

SEQ ID NO: 8260 - DNA, 13 bp, Artificial Sequence
  synthetic sequence
ttgagtcctgcac

SEQ ID NO: 8261 - DNA, 13 bp, Artificial Sequence
  synthetic sequence
cagatagtttttc

SEQ ID NO: 8262 - DNA, 13 bp, Artificial Sequence
  synthetic sequence
gaacctgaccact

SEQ ID NO: 8263 - DNA, 13 bp, Artificial Sequence
  synthetic sequence
cttcaatatcaca

SEQ ID NO: 8264 - DNA, 13 bp, Artificial Sequence
  synthetic sequence
tttccactgcacc

SEQ ID NO: 8265 - DNA, 13 bp, Artificial Sequence
  synthetic sequence
ttttcagtcccta

SEQ ID NO: 8266 - DNA, 13 bp, Artificial Sequence
  synthetic sequence
taaagcagggtga

SEQ ID NO: 8267 - DNA, 13 bp, Artificial Sequence
  synthetic sequence
agcaggatcggta

SEQ ID NO: 8268 - DNA, 13 bp, Artificial Sequence
  synthetic sequence
ttccattatgcca

SEQ ID NO: 8269 - DNA, 13 bp, Artificial Sequence
  synthetic sequence
tatgagtgacact

SEQ ID NO: 8270 - DNA, 13 bp, Artificial Sequence
  synthetic sequence
cttttgaagttgg

SEQ ID NO: 8271 - DNA, 13 bp, Artificial Sequence
  synthetic sequence
tacttagagaaca

SEQ ID NO: 8272 - DNA, 13 bp, Artificial Sequence
  synthetic sequence
gctcccattttct

SEQ ID NO: 8273 - DNA, 13 bp, Artificial Sequence
  synthetic sequence
gggaagttataca

SEQ ID NO: 8274 - DNA, 13 bp, Artificial Sequence
  synthetic sequence
cttcattgaagca

SEQ ID NO: 8275 - DNA, 13 bp, Artificial Sequence
  synthetic sequence
atatatggcacta

SEQ ID NO: 8276 - DNA, 13 bp, Artificial Sequence
  synthetic sequence
gttgtgaatgacg

SEQ ID NO: 8277 - DNA, 13 bp, Artificial Sequence
  synthetic sequence
aaatccaacaaat

SEQ ID NO: 8278 - DNA, 13 bp, Artificial Sequence
  synthetic sequence
ccaaacgcatcac

SEQ ID NO: 8279 - DNA, 13 bp, Artificial Sequence
  synthetic sequence
gatcactataacc

SEQ ID NO: 8280 - DNA, 13 bp, Artificial Sequence
  synthetic sequence
cacatcatggaac

SEQ ID NO: 8281 - DNA, 13 bp, Artificial Sequence
  synthetic sequence
tactctctgatta

SEQ ID NO: 8282 - DNA, 13 bp, Artificial Sequence
  synthetic sequence
atcctgagataca

SEQ ID NO: 8283 - DNA, 13 bp, Artificial Sequence
  synthetic sequence
ggattttgacaca

SEQ ID NO: 8284 - DNA, 13 bp, Artificial Sequence
  synthetic sequence
aatatctctcttc

SEQ ID NO: 8285 - DNA, 13 bp, Artificial Sequence
  synthetic sequence
tggatctctttca

SEQ ID NO: 8286 - DNA, 13 bp, Artificial Sequence
  synthetic sequence
ttggcccagtcat

SEQ ID NO: 8287 - DNA, 13 bp, Artificial Sequence
  synthetic sequence
gcaactttcatgg

SEQ ID NO: 8288 - DNA, 13 bp, Artificial Sequence
  synthetic sequence
gcgatgacaaatt

SEQ ID NO: 8289 - DNA, 13 bp, Artificial Sequence
  synthetic sequence
tgttgttttcaga

SEQ ID NO: 8290 - DNA, 13 bp, Artificial Sequence
  synthetic sequence
gcgcttggggatt

SEQ ID NO: 8291 - DNA, 13 bp, Artificial Sequence
  synthetic sequence
aggcgattggtca

SEQ ID NO: 8292 - DNA, 13 bp, Artificial Sequence
  synthetic sequence
aaggacagggcaa

SEQ ID NO: 8293 - DNA, 13 bp, Artificial Sequence
  synthetic sequence
acagcctgtgggt

SEQ ID NO: 8294 - DNA, 13 bp, Artificial Sequence
  synthetic sequence
agtctattgagct

SEQ ID NO: 8295 - DNA, 13 bp, Artificial Sequence
  synthetic sequence
cagcggaaccgac

SEQ ID NO: 8296 - DNA, 13 bp, Artificial Sequence
  synthetic sequence
catacagttcaag

SEQ ID NO: 8297 - DNA, 13 bp, Artificial Sequence
  synthetic sequence
ttaccatatagct

SEQ ID NO: 8298 - DNA, 13 bp, Artificial Sequence
  synthetic sequence
cgatgagtcaccg

SEQ ID NO: 8299 - DNA, 13 bp, Artificial Sequence
  synthetic sequence
tcatgacaccagc

SEQ ID NO: 8300 - DNA, 13 bp, Artificial Sequence
  synthetic sequence
attagagacaatt

SEQ ID NO: 8301 - DNA, 13 bp, Artificial Sequence
  synthetic sequence
gctggtatcaaac

SEQ ID NO: 8302 - DNA, 13 bp, Artificial Sequence
  synthetic sequence
aacaccagcaagt

SEQ ID NO: 8303 - DNA, 13 bp, Artificial Sequence
  synthetic sequence
ctttgacatgaac

SEQ ID NO: 8304 - DNA, 13 bp, Artificial Sequence
  synthetic sequence
actgtgtgtggga

SEQ ID NO: 8305 - DNA, 13 bp, Artificial Sequence
  synthetic sequence
tccaatactttgc

SEQ ID NO: 8306 - DNA, 13 bp, Artificial Sequence
  synthetic sequence
caccagggcttac

SEQ ID NO: 8307 - DNA, 13 bp, Artificial Sequence
  synthetic sequence
agacttaaacaac

SEQ ID NO: 8308 - DNA, 13 bp, Artificial Sequence
  synthetic sequence
acttcaatgatga

SEQ ID NO: 8309 - DNA, 13 bp, Artificial Sequence
  synthetic sequence
aattcaggatgat

SEQ ID NO: 8310 - DNA, 13 bp, Artificial Sequence
  synthetic sequence
gcattctgttcac

SEQ ID NO: 8311 - DNA, 13 bp, Artificial Sequence
  synthetic sequence
acgaatatgagga

SEQ ID NO: 8312 - DNA, 13 bp, Artificial Sequence
  synthetic sequence
gctcagtgtactc

SEQ ID NO: 8313 - DNA, 13 bp, Artificial Sequence
  synthetic sequence
agaactaccattc

SEQ ID NO: 8314 - DNA, 13 bp, Artificial Sequence
  synthetic sequence
atgtcagtcgggc

SEQ ID NO: 8315 - DNA, 13 bp, Artificial Sequence
  synthetic sequence
gaggaccaaccga

SEQ ID NO: 8316 - DNA, 13 bp, Artificial Sequence
  synthetic sequence
aacaatcaggggc

SEQ ID NO: 8317 - DNA, 13 bp, Artificial Sequence
  synthetic sequence
gctgccctcttgt

SEQ ID NO: 8318 - DNA, 13 bp, Artificial Sequence
  synthetic sequence
ctgggccaaccat

SEQ ID NO: 8319 - DNA, 13 bp, Artificial Sequence
  synthetic sequence
ttatgcccatgaa

SEQ ID NO: 8320 - DNA, 13 bp, Artificial Sequence
  synthetic sequence
catttggtaatct

SEQ ID NO: 8321 - DNA, 13 bp, Artificial Sequence
  synthetic sequence
atgcttgcaaggg

SEQ ID NO: 8322 - DNA, 13 bp, Artificial Sequence
  synthetic sequence
acaaactacattg

SEQ ID NO: 8323 - DNA, 13 bp, Artificial Sequence
  synthetic sequence
gacatctcatagc

SEQ ID NO: 8324 - DNA, 13 bp, Artificial Sequence
  synthetic sequence
caagagcaggcca

SEQ ID NO: 8325 - DNA, 13 bp, Artificial Sequence
  synthetic sequence
gttcggccatggc

SEQ ID NO: 8326 - DNA, 13 bp, Artificial Sequence
  synthetic sequence
tatgctgaatggg

SEQ ID NO: 8327 - DNA, 13 bp, Artificial Sequence
  synthetic sequence
tgagcattggcaa

SEQ ID NO: 8328 - DNA, 13 bp, Artificial Sequence
  synthetic sequence
tttgggacgtggg

SEQ ID NO: 8329 - DNA, 13 bp, Artificial Sequence
  synthetic sequence
tccaccaggtctt

SEQ ID NO: 8330 - DNA, 13 bp, Artificial Sequence
  synthetic sequence
actgaaccaatga

SEQ ID NO: 8331 - DNA, 13 bp, Artificial Sequence
  synthetic sequence
ggaatgagaagtt

SEQ ID NO: 8332 - DNA, 13 bp, Artificial Sequence
  synthetic sequence
agcacggtgaaaa

SEQ ID NO: 8333 - DNA, 13 bp, Artificial Sequence
  synthetic sequence
gtgtcacaatatt

SEQ ID NO: 8334 - DNA, 13 bp, Artificial Sequence
  synthetic sequence
agaaggcaaagaa

SEQ ID NO: 8335 - DNA, 13 bp, Artificial Sequence
  synthetic sequence
gggcagaacatgc

SEQ ID NO: 8336 - DNA, 13 bp, Artificial Sequence
  synthetic sequence
tagtagtgtgtgt

SEQ ID NO: 8337 - DNA, 13 bp, Artificial Sequence
  synthetic sequence
gcaccaataatag

SEQ ID NO: 8338 - DNA, 13 bp, Artificial Sequence
  synthetic sequence
tctaagaagacta

SEQ ID NO: 8339 - DNA, 13 bp, Artificial Sequence
  synthetic sequence
ctgctcacgcggt

SEQ ID NO: 8340 - DNA, 13 bp, Artificial Sequence
  synthetic sequence
agataccaatccc

SEQ ID NO: 8341 - DNA, 13 bp, Artificial Sequence
  synthetic sequence
tactcgagtgttt

SEQ ID NO: 8342 - DNA, 13 bp, Artificial Sequence
  synthetic sequence
actccaccataac

SEQ ID NO: 8343 - DNA, 13 bp, Artificial Sequence
  synthetic sequence
tacaatcatagac

SEQ ID NO: 8344 - DNA, 13 bp, Artificial Sequence
  synthetic sequence
taccagataaagt

SEQ ID NO: 8345 - DNA, 13 bp, Artificial Sequence
  synthetic sequence
aaagatgagctca

SEQ ID NO: 8346 - DNA, 13 bp, Artificial Sequence
  synthetic sequence
tgttctggtacca

SEQ ID NO: 8347 - DNA, 13 bp, Artificial Sequence
  synthetic sequence
caaaatgttggag

SEQ ID NO: 8348 - DNA, 13 bp, Artificial Sequence
  synthetic sequence
atcagccttagta

SEQ ID NO: 8349 - DNA, 13 bp, Artificial Sequence
  synthetic sequence
agtttgcggacaa

SEQ ID NO: 8350 - DNA, 13 bp, Artificial Sequence
  synthetic sequence
aacgggagtgtac

SEQ ID NO: 8351 - DNA, 13 bp, Artificial Sequence
  synthetic sequence
agatatcatgatt

SEQ ID NO: 8352 - DNA, 13 bp, Artificial Sequence
  synthetic sequence
cgtgatctcctgt

SEQ ID NO: 8353 - DNA, 13 bp, Artificial Sequence
  synthetic sequence
tatgtgagcaagt

SEQ ID NO: 8354 - DNA, 13 bp, Artificial Sequence
  synthetic sequence
gacgtttgtcata

SEQ ID NO: 8355 - DNA, 13 bp, Artificial Sequence
  synthetic sequence
acaacgtcaccct

SEQ ID NO: 8356 - DNA, 13 bp, Artificial Sequence
  synthetic sequence
gggcacgctatat

SEQ ID NO: 8357 - DNA, 13 bp, Artificial Sequence
  synthetic sequence
tattttccaagta

SEQ ID NO: 8358 - DNA, 13 bp, Artificial Sequence
  synthetic sequence
ctagcggcaattc

SEQ ID NO: 8359 - DNA, 13 bp, Artificial Sequence
  synthetic sequence
ctgtcaggctatt

SEQ ID NO: 8360 - DNA, 13 bp, Artificial Sequence
  synthetic sequence
ccgatcaacagtc

SEQ ID NO: 8361 - DNA, 13 bp, Artificial Sequence
  synthetic sequence
accgtgggtacag

SEQ ID NO: 8362 - DNA, 13 bp, Artificial Sequence
  synthetic sequence
ccatgccgcaata

SEQ ID NO: 8363 - DNA, 13 bp, Artificial Sequence
  synthetic sequence
gtctccttgttct

SEQ ID NO: 8364 - DNA, 13 bp, Artificial Sequence
  synthetic sequence
gttttcaaggtgc

SEQ ID NO: 8365 - DNA, 13 bp, Artificial Sequence
  synthetic sequence
cattgcggacctg

SEQ ID NO: 8366 - DNA, 13 bp, Artificial Sequence
  synthetic sequence
gaaggagaaaacg

SEQ ID NO: 8367 - DNA, 13 bp, Artificial Sequence
  synthetic sequence
gacctatgtgaag

SEQ ID NO: 8368 - DNA, 13 bp, Artificial Sequence
  synthetic sequence
gtaacttagaagc

SEQ ID NO: 8369 - DNA, 13 bp, Artificial Sequence
  synthetic sequence
ccaccaccaccag

SEQ ID NO: 8370 - DNA, 13 bp, Artificial Sequence
  synthetic sequence
gccatgccacaat

SEQ ID NO: 8371 - DNA, 13 bp, Artificial Sequence
  synthetic sequence
attcaatgatcaa

SEQ ID NO: 8372 - DNA, 13 bp, Artificial Sequence
  synthetic sequence
aattactacaagg

SEQ ID NO: 8373 - DNA, 13 bp, Artificial Sequence
  synthetic sequence
atgtgaacacaca

SEQ ID NO: 8374 - DNA, 13 bp, Artificial Sequence
  synthetic sequence
tccagggcgcata

SEQ ID NO: 8375 - DNA, 13 bp, Artificial Sequence
  synthetic sequence
tacaatcacagac

SEQ ID NO: 8376 - DNA, 13 bp, Artificial Sequence
  synthetic sequence
gatgcagtgtatg

SEQ ID NO: 8377 - DNA, 13 bp, Artificial Sequence
  synthetic sequence
atatgcagtatca

SEQ ID NO: 8378 - DNA, 13 bp, Artificial Sequence
  synthetic sequence
ttgttggctttgc

SEQ ID NO: 8379 - DNA, 13 bp, Artificial Sequence
  synthetic sequence
tgtgcatcaagga

SEQ ID NO: 8380 - DNA, 13 bp, Artificial Sequence
  synthetic sequence
ggccatgatgaag

SEQ ID NO: 8381 - DNA, 13 bp, Artificial Sequence
  synthetic sequence
aactcacctttgt

SEQ ID NO: 8382 - DNA, 13 bp, Artificial Sequence
  synthetic sequence
gatgataaagtca

SEQ ID NO: 8383 - DNA, 13 bp, Artificial Sequence
  synthetic sequence
atgtgtctttgtt

SEQ ID NO: 8384 - DNA, 13 bp, Artificial Sequence
  synthetic sequence
gagtgtgcaaacg

SEQ ID NO: 8385 - DNA, 13 bp, Artificial Sequence
  synthetic sequence
agagagacatcct

SEQ ID NO: 8386 - DNA, 13 bp, Artificial Sequence
  synthetic sequence
ggtaagtttttgc

SEQ ID NO: 8387 - DNA, 13 bp, Artificial Sequence
  synthetic sequence
ggcgctggctcaa

SEQ ID NO: 8388 - DNA, 13 bp, Artificial Sequence
  synthetic sequence
agatgactaatgc

SEQ ID NO: 8389 - DNA, 13 bp, Artificial Sequence
  synthetic sequence
tgagtatcggtaa

SEQ ID NO: 8390 - DNA, 13 bp, Artificial Sequence
  synthetic sequence
attggcttggcac

SEQ ID NO: 8391 - DNA, 13 bp, Artificial Sequence
  synthetic sequence
aatacctgtaatg

SEQ ID NO: 8392 - DNA, 13 bp, Artificial Sequence
  synthetic sequence
caagggtgcctct

SEQ ID NO: 8393 - DNA, 13 bp, Artificial Sequence
  synthetic sequence
aggattcacaaat

SEQ ID NO: 8394 - DNA, 13 bp, Artificial Sequence
  synthetic sequence
gggagctagtagc

SEQ ID NO: 8395 - DNA, 13 bp, Artificial Sequence
  synthetic sequence
tagatttgcttct

SEQ ID NO: 8396 - DNA, 13 bp, Artificial Sequence
  synthetic sequence
gttgacgactatg

SEQ ID NO: 8397 - DNA, 13 bp, Artificial Sequence
  synthetic sequence
ctcgtgaagatca

SEQ ID NO: 8398 - DNA, 13 bp, Artificial Sequence
  synthetic sequence
cttctaaataaag

SEQ ID NO: 8399 - DNA, 13 bp, Artificial Sequence
  synthetic sequence
ccctgtcatgccc

SEQ ID NO: 8400 - DNA, 13 bp, Artificial Sequence
  synthetic sequence
agctcaatcgaaa

SEQ ID NO: 8401 - DNA, 13 bp, Artificial Sequence
  synthetic sequence
cgcaaatggacaa

SEQ ID NO: 8402 - DNA, 13 bp, Artificial Sequence
  synthetic sequence
ggatgattgcata

SEQ ID NO: 8403 - DNA, 13 bp, Artificial Sequence
  synthetic sequence
cagtccagctgtg

SEQ ID NO: 8404 - DNA, 13 bp, Artificial Sequence
  synthetic sequence
caattttcccgca

SEQ ID NO: 8405 - DNA, 13 bp, Artificial Sequence
  synthetic sequence
aaccaattcagaa

SEQ ID NO: 8406 - DNA, 13 bp, Artificial Sequence
  synthetic sequence
cttcgcaaagtta

SEQ ID NO: 8407 - DNA, 13 bp, Artificial Sequence
  synthetic sequence
tcagaatgctgag

SEQ ID NO: 8408 - DNA, 13 bp, Artificial Sequence
  synthetic sequence
attggcagagttg

SEQ ID NO: 8409 - DNA, 13 bp, Artificial Sequence
  synthetic sequence
actttgctcacta

SEQ ID NO: 8410 - DNA, 13 bp, Artificial Sequence
  synthetic sequence
gagacaaattaca

SEQ ID NO: 8411 - DNA, 13 bp, Artificial Sequence
  synthetic sequence
ccggaccaactat

SEQ ID NO: 8412 - DNA, 13 bp, Artificial Sequence
  synthetic sequence
agattgagaagca

SEQ ID NO: 8413 - DNA, 13 bp, Artificial Sequence
  synthetic sequence
tacaagacattcc

SEQ ID NO: 8414 - DNA, 13 bp, Artificial Sequence
  synthetic sequence
atgggaggcgatg

SEQ ID NO: 8415 - DNA, 13 bp, Artificial Sequence
  synthetic sequence
ctccaccattact

SEQ ID NO: 8416 - DNA, 13 bp, Artificial Sequence
  synthetic sequence
acagaaccagtta

SEQ ID NO: 8417 - DNA, 13 bp, Artificial Sequence
  synthetic sequence
cttcaagaaacaa

SEQ ID NO: 8418 - DNA, 13 bp, Artificial Sequence
  synthetic sequence
cggtgcaaaatat

SEQ ID NO: 8419 - DNA, 13 bp, Artificial Sequence
  synthetic sequence
tttatatcccagg

SEQ ID NO: 8420 - DNA, 13 bp, Artificial Sequence
  synthetic sequence
tgatggtgattcc

SEQ ID NO: 8421 - DNA, 13 bp, Artificial Sequence
  synthetic sequence
gccatccagttca

SEQ ID NO: 8422 - DNA, 13 bp, Artificial Sequence
  synthetic sequence
gaccaactaactc

SEQ ID NO: 8423 - DNA, 13 bp, Artificial Sequence
  synthetic sequence
aacatgggaaccc

SEQ ID NO: 8424 - DNA, 13 bp, Artificial Sequence
  synthetic sequence
tgtacagccaaaa

SEQ ID NO: 8425 - DNA, 13 bp, Artificial Sequence
  synthetic sequence
atgcttttggttc

SEQ ID NO: 8426 - DNA, 13 bp, Artificial Sequence
  synthetic sequence
gtacacagcaacc

SEQ ID NO: 8427 - DNA, 13 bp, Artificial Sequence
  synthetic sequence
ttcaccagggatg

SEQ ID NO: 8428 - DNA, 13 bp, Artificial Sequence
  synthetic sequence
gctgcaaaggagt

SEQ ID NO: 8429 - DNA, 13 bp, Artificial Sequence
  synthetic sequence
cgccacatgtaga

SEQ ID NO: 8430 - DNA, 13 bp, Artificial Sequence
  synthetic sequence
cagggatgcccaa

SEQ ID NO: 8431 - DNA, 13 bp, Artificial Sequence
  synthetic sequence
agcagtgtatgtg

SEQ ID NO: 8432 - DNA, 13 bp, Artificial Sequence
  synthetic sequence
catgtgaaaaatt

SEQ ID NO: 8433 - DNA, 13 bp, Artificial Sequence
  synthetic sequence
gaaaagttaaaca

SEQ ID NO: 8434 - DNA, 13 bp, Artificial Sequence
  synthetic sequence
taatagtggttag

SEQ ID NO: 8435 - DNA, 13 bp, Artificial Sequence
  synthetic sequence
caaacagctcccc

SEQ ID NO: 8436 - DNA, 13 bp, Artificial Sequence
  synthetic sequence
ccacttaaacacg

SEQ ID NO: 8437 - DNA, 13 bp, Artificial Sequence
  synthetic sequence
atcaacccaccca

SEQ ID NO: 8438 - DNA, 13 bp, Artificial Sequence
  synthetic sequence
accagtcccacgt

SEQ ID NO: 8439 - DNA, 13 bp, Artificial Sequence
  synthetic sequence
ttcccaaacatgt

SEQ ID NO: 8440 - DNA, 13 bp, Artificial Sequence
  synthetic sequence
acgtatctctatt

SEQ ID NO: 8441 - DNA, 13 bp, Artificial Sequence
  synthetic sequence
cactgctgaaact

SEQ ID NO: 8442 - DNA, 13 bp, Artificial Sequence
  synthetic sequence
aaatcagtggata

SEQ ID NO: 8443 - DNA, 13 bp, Artificial Sequence
  synthetic sequence
aggcattaaaaag

SEQ ID NO: 8444 - DNA, 13 bp, Artificial Sequence
  synthetic sequence
agctctcctcaag

SEQ ID NO: 8445 - DNA, 13 bp, Artificial Sequence
  synthetic sequence
tacgtgtggcaaa

SEQ ID NO: 8446 - DNA, 13 bp, Artificial Sequence
  synthetic sequence
ctaacattgtggt

SEQ ID NO: 8447 - DNA, 13 bp, Artificial Sequence
  synthetic sequence
aacatcaactact

SEQ ID NO: 8448 - DNA, 13 bp, Artificial Sequence
  synthetic sequence
aaacatgttagca

SEQ ID NO: 8449 - DNA, 13 bp, Artificial Sequence
  synthetic sequence
caaccagagcagg

SEQ ID NO: 8450 - DNA, 13 bp, Artificial Sequence
  synthetic sequence
accagtggatcaa

SEQ ID NO: 8451 - DNA, 13 bp, Artificial Sequence
  synthetic sequence
aaaacaaaattgg

SEQ ID NO: 8452 - DNA, 13 bp, Artificial Sequence
  synthetic sequence
gtcttccaccagg

SEQ ID NO: 8453 - DNA, 13 bp, Artificial Sequence
  synthetic sequence
ggtggcgttctca

SEQ ID NO: 8454 - DNA, 13 bp, Artificial Sequence
  synthetic sequence
cacacaaggagac

SEQ ID NO: 8455 - DNA, 13 bp, Artificial Sequence
  synthetic sequence
gcttaaacagaaa

SEQ ID NO: 8456 - DNA, 13 bp, Artificial Sequence
  synthetic sequence
tgttcacttcccc

SEQ ID NO: 8457 - DNA, 13 bp, Artificial Sequence
  synthetic sequence
aggaactcaagca

SEQ ID NO: 8458 - DNA, 13 bp, Artificial Sequence
  synthetic sequence
tgcaacttagaag

SEQ ID NO: 8459 - DNA, 13 bp, Artificial Sequence
  synthetic sequence
tcaccaaccagat

SEQ ID NO: 8460 - DNA, 13 bp, Artificial Sequence
  synthetic sequence
aacttcccctctt

SEQ ID NO: 8461 - DNA, 13 bp, Artificial Sequence
  synthetic sequence
tggagaggacact

SEQ ID NO: 8462 - DNA, 13 bp, Artificial Sequence
  synthetic sequence
gcgtctgctgcgt

SEQ ID NO: 8463 - DNA, 13 bp, Artificial Sequence
  synthetic sequence
ctatgccgcaatt

SEQ ID NO: 8464 - DNA, 13 bp, Artificial Sequence
  synthetic sequence
caggaaagtgcta

SEQ ID NO: 8465 - DNA, 13 bp, Artificial Sequence
  synthetic sequence
accccagacaaaa

SEQ ID NO: 8466 - DNA, 13 bp, Artificial Sequence
  synthetic sequence
ttgtgtcaaaacc

SEQ ID NO: 8467 - DNA, 13 bp, Artificial Sequence
  synthetic sequence
agagaacactatt

SEQ ID NO: 8468 - DNA, 13 bp, Artificial Sequence
  synthetic sequence
ctggtgatcgtag

SEQ ID NO: 8469 - DNA, 13 bp, Artificial Sequence
  synthetic sequence
gtgaatgataaaa

SEQ ID NO: 8470 - DNA, 13 bp, Artificial Sequence
  synthetic sequence
gttacatttgtta

SEQ ID NO: 8471 - DNA, 13 bp, Artificial Sequence
  synthetic sequence
gggttcatcacct

SEQ ID NO: 8472 - DNA, 13 bp, Artificial Sequence
  synthetic sequence
tggtcccagtaat

SEQ ID NO: 8473 - DNA, 13 bp, Artificial Sequence
  synthetic sequence
ctatgaggaattc

SEQ ID NO: 8474 - DNA, 13 bp, Artificial Sequence
  synthetic sequence
gggagtacaacca

SEQ ID NO: 8475 - DNA, 13 bp, Artificial Sequence
  synthetic sequence
attaagcaagaaa

SEQ ID NO: 8476 - DNA, 13 bp, Artificial Sequence
  synthetic sequence
gtctagccggtca

SEQ ID NO: 8477 - DNA, 13 bp, Artificial Sequence
  synthetic sequence
atggcgacgatgt

SEQ ID NO: 8478 - DNA, 13 bp, Artificial Sequence
  synthetic sequence
tacacacacaagg

SEQ ID NO: 8479 - DNA, 13 bp, Artificial Sequence
  synthetic sequence
aatccagttgtgt

SEQ ID NO: 8480 - DNA, 13 bp, Artificial Sequence
  synthetic sequence
tggatcaatctac

SEQ ID NO: 8481 - DNA, 13 bp, Artificial Sequence
  synthetic sequence
aggacataatggt

SEQ ID NO: 8482 - DNA, 13 bp, Artificial Sequence
  synthetic sequence
atatcagcattag

SEQ ID NO: 8483 - DNA, 13 bp, Artificial Sequence
  synthetic sequence
gggagttgtcgga

SEQ ID NO: 8484 - DNA, 13 bp, Artificial Sequence
  synthetic sequence
gcaaggcagttca

SEQ ID NO: 8485 - DNA, 13 bp, Artificial Sequence
  synthetic sequence
taatgctagatgg

SEQ ID NO: 8486 - DNA, 13 bp, Artificial Sequence
  synthetic sequence
aagtcaagcaaca

SEQ ID NO: 8487 - DNA, 13 bp, Artificial Sequence
  synthetic sequence
cccatttgccaaa

SEQ ID NO: 8488 - DNA, 13 bp, Artificial Sequence
  synthetic sequence
aactctgaacaaa

SEQ ID NO: 8489 - DNA, 13 bp, Artificial Sequence
  synthetic sequence
gccggaaatgaac

SEQ ID NO: 8490 - DNA, 13 bp, Artificial Sequence
  synthetic sequence
cagcgaaaagctt

SEQ ID NO: 8491 - DNA, 13 bp, Artificial Sequence
  synthetic sequence
cacatgtcttgct

SEQ ID NO: 8492 - DNA, 13 bp, Artificial Sequence
  synthetic sequence
agacacttaattt

SEQ ID NO: 8493 - DNA, 13 bp, Artificial Sequence
  synthetic sequence
aaacttccacgtt

SEQ ID NO: 8494 - DNA, 13 bp, Artificial Sequence
  synthetic sequence
gaagcgttatgca

SEQ ID NO: 8495 - DNA, 13 bp, Artificial Sequence
  synthetic sequence
cctgttatgccaa

SEQ ID NO: 8496 - DNA, 13 bp, Artificial Sequence
  synthetic sequence
ccgcgtttgtgtc

SEQ ID NO: 8497 - DNA, 13 bp, Artificial Sequence
  synthetic sequence
ttatatgggatgt

SEQ ID NO: 8498 - DNA, 13 bp, Artificial Sequence
  synthetic sequence
ccgtggatgacta

SEQ ID NO: 8499 - DNA, 13 bp, Artificial Sequence
  synthetic sequence
atgcctgcaaagg

SEQ ID NO: 8500 - DNA, 13 bp, Artificial Sequence
  synthetic sequence
tatcctattcaca

SEQ ID NO: 8501 - DNA, 13 bp, Artificial Sequence
  synthetic sequence
tatttcaatgatg

SEQ ID NO: 8502 - DNA, 13 bp, Artificial Sequence
  synthetic sequence
aatgactacgtgt

SEQ ID NO: 8503 - DNA, 13 bp, Artificial Sequence
  synthetic sequence
gtggagaactacg

SEQ ID NO: 8504 - DNA, 13 bp, Artificial Sequence
  synthetic sequence
tttgggcaaaaca

SEQ ID NO: 8505 - DNA, 13 bp, Artificial Sequence
  synthetic sequence
gttccttctagcc

SEQ ID NO: 8506 - DNA, 13 bp, Artificial Sequence
  synthetic sequence
caacaatgtgaac

SEQ ID NO: 8507 - DNA, 13 bp, Artificial Sequence
  synthetic sequence
ggtaacgcctaca

SEQ ID NO: 8508 - DNA, 13 bp, Artificial Sequence
  synthetic sequence
ctgatgactatgg

SEQ ID NO: 8509 - DNA, 13 bp, Artificial Sequence
  synthetic sequence
cttaacattgttt

SEQ ID NO: 8510 - DNA, 13 bp, Artificial Sequence
  synthetic sequence
cagggtattcgag

SEQ ID NO: 8511 - DNA, 13 bp, Artificial Sequence
  synthetic sequence
acgaagtcacctg

SEQ ID NO: 8512 - DNA, 13 bp, Artificial Sequence
  synthetic sequence
cgtgcacaattat

SEQ ID NO: 8513 - DNA, 13 bp, Artificial Sequence
  synthetic sequence
caggtgtttatta

SEQ ID NO: 8514 - DNA, 13 bp, Artificial Sequence
  synthetic sequence
gtactccctacca

SEQ ID NO: 8515 - DNA, 13 bp, Artificial Sequence
  synthetic sequence
gcgcaggaagtgg

SEQ ID NO: 8516 - DNA, 13 bp, Artificial Sequence
  synthetic sequence
taccagtgatgtt

SEQ ID NO: 8517 - DNA, 13 bp, Artificial Sequence
  synthetic sequence
ccaccaaggctgt

SEQ ID NO: 8518 - DNA, 13 bp, Artificial Sequence
  synthetic sequence
tgtacaacttccc

SEQ ID NO: 8519 - DNA, 13 bp, Artificial Sequence
  synthetic sequence
agttcagagacat

SEQ ID NO: 8520 - DNA, 13 bp, Artificial Sequence
  synthetic sequence
catggggaccata

SEQ ID NO: 8521 - DNA, 13 bp, Artificial Sequence
  synthetic sequence
atccttatgaatg

SEQ ID NO: 8522 - DNA, 13 bp, Artificial Sequence
  synthetic sequence
ttgtgtgtgggaa

SEQ ID NO: 8523 - DNA, 13 bp, Artificial Sequence
  synthetic sequence
agcgttttccacc

SEQ ID NO: 8524 - DNA, 13 bp, Artificial Sequence
  synthetic sequence
cctttcctgagca

SEQ ID NO: 8525 - DNA, 13 bp, Artificial Sequence
  synthetic sequence
gcccatgaaagac

SEQ ID NO: 8526 - DNA, 13 bp, Artificial Sequence
  synthetic sequence
gcggagaatttac

SEQ ID NO: 8527 - DNA, 13 bp, Artificial Sequence
  synthetic sequence
cggacacccaaag

SEQ ID NO: 8528 - DNA, 13 bp, Artificial Sequence
  synthetic sequence
agccgcattcagg

SEQ ID NO: 8529 - DNA, 13 bp, Artificial Sequence
  synthetic sequence
atactcagtccgg

SEQ ID NO: 8530 - DNA, 13 bp, Artificial Sequence
  synthetic sequence
ctgacatgggcat

SEQ ID NO: 8531 - DNA, 13 bp, Artificial Sequence
  synthetic sequence
tagggttaagcca

SEQ ID NO: 8532 - DNA, 13 bp, Artificial Sequence
  synthetic sequence
tagtattcactct

SEQ ID NO: 8533 - DNA, 13 bp, Artificial Sequence
  synthetic sequence
ggtgtgttgatga

SEQ ID NO: 8534 - DNA, 13 bp, Artificial Sequence
  synthetic sequence
caaaatctacact

SEQ ID NO: 8535 - DNA, 13 bp, Artificial Sequence
  synthetic sequence
ggccttgcacttt

SEQ ID NO: 8536 - DNA, 13 bp, Artificial Sequence
  synthetic sequence
acaggtgatggga

SEQ ID NO: 8537 - DNA, 13 bp, Artificial Sequence
  synthetic sequence
atgctgcctgacc

SEQ ID NO: 8538 - DNA, 13 bp, Artificial Sequence
  synthetic sequence
aaatacctcttta

SEQ ID NO: 8539 - DNA, 13 bp, Artificial Sequence
  synthetic sequence
acccactagtgat

SEQ ID NO: 8540 - DNA, 13 bp, Artificial Sequence
  synthetic sequence
tcaggaaccaacc

SEQ ID NO: 8541 - DNA, 13 bp, Artificial Sequence
  synthetic sequence
actccctgttcca

SEQ ID NO: 8542 - DNA, 13 bp, Artificial Sequence
  synthetic sequence
caccaacatggat

SEQ ID NO: 8543 - DNA, 13 bp, Artificial Sequence
  synthetic sequence
aagtgatctgggt

SEQ ID NO: 8544 - DNA, 13 bp, Artificial Sequence
  synthetic sequence
ttgctccaaaaga

SEQ ID NO: 8545 - DNA, 13 bp, Artificial Sequence
  synthetic sequence
ccacctgtcatag

SEQ ID NO: 8546 - DNA, 13 bp, Artificial Sequence
  synthetic sequence
ccctcggtccaaa

SEQ ID NO: 8547 - DNA, 13 bp, Artificial Sequence
  synthetic sequence
ctgctggttcttt

SEQ ID NO: 8548 - DNA, 13 bp, Artificial Sequence
  synthetic sequence
tgagcgcacgtga

SEQ ID NO: 8549 - DNA, 13 bp, Artificial Sequence
  synthetic sequence
acctccacttcct

SEQ ID NO: 8550 - DNA, 13 bp, Artificial Sequence
  synthetic sequence
gcactcgttgtta

SEQ ID NO: 8551 - DNA, 13 bp, Artificial Sequence
  synthetic sequence
ggtgtgccaccta

SEQ ID NO: 8552 - DNA, 13 bp, Artificial Sequence
  synthetic sequence
atgattccagcca

SEQ ID NO: 8553 - DNA, 13 bp, Artificial Sequence
  synthetic sequence
tgcattatacacc

SEQ ID NO: 8554 - DNA, 13 bp, Artificial Sequence
  synthetic sequence
ggcaagcaaacca

SEQ ID NO: 8555 - DNA, 13 bp, Artificial Sequence
  synthetic sequence
taattttgatctc

SEQ ID NO: 8556 - DNA, 13 bp, Artificial Sequence
  synthetic sequence
gtcgtctgatgtc

SEQ ID NO: 8557 - DNA, 13 bp, Artificial Sequence
  synthetic sequence
ctttgacatgctt

SEQ ID NO: 8558 - DNA, 13 bp, Artificial Sequence
  synthetic sequence
actgggacgcttc

SEQ ID NO: 8559 - DNA, 13 bp, Artificial Sequence
  synthetic sequence
gggctagtgtggc

SEQ ID NO: 8560 - DNA, 13 bp, Artificial Sequence
  synthetic sequence
ctgagcgaaacac

SEQ ID NO: 8561 - DNA, 13 bp, Artificial Sequence
  synthetic sequence
gtctcatgtgccc

SEQ ID NO: 8562 - DNA, 13 bp, Artificial Sequence
  synthetic sequence
cttcagctgcgta

SEQ ID NO: 8563 - DNA, 13 bp, Artificial Sequence
  synthetic sequence
tacttgtccatac

SEQ ID NO: 8564 - DNA, 13 bp, Artificial Sequence
  synthetic sequence
cgtagtggtccac

SEQ ID NO: 8565 - DNA, 13 bp, Artificial Sequence
  synthetic sequence
tcggtgactagca

SEQ ID NO: 8566 - DNA, 13 bp, Artificial Sequence
  synthetic sequence
ttttccctgacct

SEQ ID NO: 8567 - DNA, 13 bp, Artificial Sequence
  synthetic sequence
cattgcatgctga

SEQ ID NO: 8568 - DNA, 13 bp, Artificial Sequence
  synthetic sequence
agttccccacata

SEQ ID NO: 8569 - DNA, 13 bp, Artificial Sequence
  synthetic sequence
ccggtagtgtgtt

SEQ ID NO: 8570 - DNA, 13 bp, Artificial Sequence
  synthetic sequence
cttccaccaccat

SEQ ID NO: 8571 - DNA, 13 bp, Artificial Sequence
  synthetic sequence
gttcctggtcact

SEQ ID NO: 8572 - DNA, 13 bp, Artificial Sequence
  synthetic sequence
tctgacacggttg

SEQ ID NO: 8573 - DNA, 13 bp, Artificial Sequence
  synthetic sequence
ctcagctatttcc

SEQ ID NO: 8574 - DNA, 13 bp, Artificial Sequence
  synthetic sequence
atccctttgtaca

SEQ ID NO: 8575 - DNA, 13 bp, Artificial Sequence
  synthetic sequence
aaagtacacgcat

SEQ ID NO: 8576 - DNA, 13 bp, Artificial Sequence
  synthetic sequence
tgggacgtacgtg

SEQ ID NO: 8577 - DNA, 13 bp, Artificial Sequence
  synthetic sequence
ctggacgcctcaa

SEQ ID NO: 8578 - DNA, 13 bp, Artificial Sequence
  synthetic sequence
ctggctataatat

SEQ ID NO: 8579 - DNA, 13 bp, Artificial Sequence
  synthetic sequence
tagtagtggtaac

SEQ ID NO: 8580 - DNA, 13 bp, Artificial Sequence
  synthetic sequence
caccttaggatac

SEQ ID NO: 8581 - DNA, 13 bp, Artificial Sequence
  synthetic sequence
atacttgcgttcc

SEQ ID NO: 8582 - DNA, 13 bp, Artificial Sequence
  synthetic sequence
gattggctgagtt

SEQ ID NO: 8583 - DNA, 13 bp, Artificial Sequence
  synthetic sequence
tggtgtgttagga

SEQ ID NO: 8584 - DNA, 13 bp, Artificial Sequence
  synthetic sequence
cccttaccagctt

SEQ ID NO: 8585 - DNA, 13 bp, Artificial Sequence
  synthetic sequence
cgttcctggaaaa

SEQ ID NO: 8586 - DNA, 13 bp, Artificial Sequence
  synthetic sequence
tggtgtatggcat

SEQ ID NO: 8587 - DNA, 13 bp, Artificial Sequence
  synthetic sequence
gtaaagaattcta

SEQ ID NO: 8588 - DNA, 13 bp, Artificial Sequence
  synthetic sequence
actggatggggtg

SEQ ID NO: 8589 - DNA, 13 bp, Artificial Sequence
  synthetic sequence
gcatcaacccttt

SEQ ID NO: 8590 - DNA, 13 bp, Artificial Sequence
  synthetic sequence
gttatcgcgtctt

SEQ ID NO: 8591 - DNA, 13 bp, Artificial Sequence
  synthetic sequence
taagtggtataaa

SEQ ID NO: 8592 - DNA, 13 bp, Artificial Sequence
  synthetic sequence
ttgcactgcacat

SEQ ID NO: 8593 - DNA, 13 bp, Artificial Sequence
  synthetic sequence
tgttttggcgttc

SEQ ID NO: 8594 - DNA, 13 bp, Artificial Sequence
  synthetic sequence
ctgtcactgtatc

SEQ ID NO: 8595 - DNA, 13 bp, Artificial Sequence
  synthetic sequence
agataatctggcc

SEQ ID NO: 8596 - DNA, 13 bp, Artificial Sequence
  synthetic sequence
tctcagcagcagt

SEQ ID NO: 8597 - DNA, 13 bp, Artificial Sequence
  synthetic sequence
cttggcatctagc

SEQ ID NO: 8598 - DNA, 13 bp, Artificial Sequence
  synthetic sequence
acatattgtccat

SEQ ID NO: 8599 - DNA, 13 bp, Artificial Sequence
  synthetic sequence
tcttgagccaccc

SEQ ID NO: 8600 - DNA, 13 bp, Artificial Sequence
  synthetic sequence
actgggtttctcg

SEQ ID NO: 8601 - DNA, 13 bp, Artificial Sequence
  synthetic sequence
ttcaacattaatg

SEQ ID NO: 8602 - DNA, 13 bp, Artificial Sequence
  synthetic sequence
cactatacccaca

SEQ ID NO: 8603 - DNA, 13 bp, Artificial Sequence
  synthetic sequence
agttgccctgcat

SEQ ID NO: 8604 - DNA, 13 bp, Artificial Sequence
  synthetic sequence
aacagaatcattc

SEQ ID NO: 8605 - DNA, 13 bp, Artificial Sequence
  synthetic sequence
tgagccactctat

SEQ ID NO: 8606 - DNA, 13 bp, Artificial Sequence
  synthetic sequence
tcctttaatttgg

SEQ ID NO: 8607 - DNA, 13 bp, Artificial Sequence
  synthetic sequence
atgcgttgcactg

SEQ ID NO: 8608 - DNA, 13 bp, Artificial Sequence
  synthetic sequence
aacttccaccacc

SEQ ID NO: 8609 - DNA, 13 bp, Artificial Sequence
  synthetic sequence
tcaatggtagcaa

SEQ ID NO: 8610 - DNA, 13 bp, Artificial Sequence
  synthetic sequence
catgttcgcacct

SEQ ID NO: 8611 - DNA, 13 bp, Artificial Sequence
  synthetic sequence
cccacctatcata

SEQ ID NO: 8612 - DNA, 13 bp, Artificial Sequence
  synthetic sequence
tgagtcgacttcc

SEQ ID NO: 8613 - DNA, 13 bp, Artificial Sequence
  synthetic sequence
agaacgcaggtag

SEQ ID NO: 8614 - DNA, 13 bp, Artificial Sequence
  synthetic sequence
aaccacacggggc

SEQ ID NO: 8615 - DNA, 13 bp, Artificial Sequence
  synthetic sequence
ctgtgtactcatc

SEQ ID NO: 8616 - DNA, 13 bp, Artificial Sequence
  synthetic sequence
attattgctctgt

SEQ ID NO: 8617 - DNA, 13 bp, Artificial Sequence
  synthetic sequence
aggttgttagtgc

SEQ ID NO: 8618 - DNA, 13 bp, Artificial Sequence
  synthetic sequence
aacatgtccaagg

SEQ ID NO: 8619 - DNA, 13 bp, Artificial Sequence
  synthetic sequence
tctttgtccacta

SEQ ID NO: 8620 - DNA, 13 bp, Artificial Sequence
  synthetic sequence
gggtcttttgtcc

SEQ ID NO: 8621 - DNA, 13 bp, Artificial Sequence
  synthetic sequence
gcacgtacattat

SEQ ID NO: 8622 - DNA, 13 bp, Artificial Sequence
  synthetic sequence
tccctgggtcttg

SEQ ID NO: 8623 - DNA, 13 bp, Artificial Sequence
  synthetic sequence
acttcttctttag

SEQ ID NO: 8624 - DNA, 13 bp, Artificial Sequence
  synthetic sequence
gcagacctacaca

SEQ ID NO: 8625 - DNA, 13 bp, Artificial Sequence
  synthetic sequence
gcaactgatttcc

SEQ ID NO: 8626 - DNA, 13 bp, Artificial Sequence
  synthetic sequence
ctttgccagcctc

SEQ ID NO: 8627 - DNA, 13 bp, Artificial Sequence
  synthetic sequence
taacatgcttggg

SEQ ID NO: 8628 - DNA, 13 bp, Artificial Sequence
  synthetic sequence
tgcattggcacct

SEQ ID NO: 8629 - DNA, 13 bp, Artificial Sequence
  synthetic sequence
gttgtttaggtta

SEQ ID NO: 8630 - DNA, 13 bp, Artificial Sequence
  synthetic sequence
ttggcacgaatgt

SEQ ID NO: 8631 - DNA, 13 bp, Artificial Sequence
  synthetic sequence
catccttacgact

SEQ ID NO: 8632 - DNA, 13 bp, Artificial Sequence
  synthetic sequence
ttgctgagttgga

SEQ ID NO: 8633 - DNA, 13 bp, Artificial Sequence
  synthetic sequence
ccgtgcaatggct

SEQ ID NO: 8634 - DNA, 13 bp, Artificial Sequence
  synthetic sequence
gtcactccagtca

SEQ ID NO: 8635 - DNA, 13 bp, Artificial Sequence
  synthetic sequence
gatacaaagcaca

SEQ ID NO: 8636 - DNA, 13 bp, Artificial Sequence
  synthetic sequence
tgttgagacttga

SEQ ID NO: 8637 - DNA, 13 bp, Artificial Sequence
  synthetic sequence
atattcctttgtt

SEQ ID NO: 8638 - DNA, 13 bp, Artificial Sequence
  synthetic sequence
caccccatatgcg

SEQ ID NO: 8639 - DNA, 13 bp, Artificial Sequence
  synthetic sequence
cttttggcctcag

SEQ ID NO: 8640 - DNA, 13 bp, Artificial Sequence
  synthetic sequence
tggcagtcactgt

SEQ ID NO: 8641 - DNA, 13 bp, Artificial Sequence
  synthetic sequence
ccaaacacttggc

SEQ ID NO: 8642 - DNA, 13 bp, Artificial Sequence
  synthetic sequence
gtctgaaactgtt

SEQ ID NO: 8643 - DNA, 13 bp, Artificial Sequence
  synthetic sequence
ttcccacgtacgc

SEQ ID NO: 8644 - DNA, 13 bp, Artificial Sequence
  synthetic sequence
attgttcatctgc

SEQ ID NO: 8645 - DNA, 13 bp, Artificial Sequence
  synthetic sequence
ccatccttgtcca

SEQ ID NO: 8646 - DNA, 13 bp, Artificial Sequence
  synthetic sequence
cctgctccattgc

SEQ ID NO: 8647 - DNA, 13 bp, Artificial Sequence
  synthetic sequence
gtaaacatttcta

SEQ ID NO: 8648 - DNA, 13 bp, Artificial Sequence
  synthetic sequence
gcattctctttgt

SEQ ID NO: 8649 - DNA, 13 bp, Artificial Sequence
  synthetic sequence
ggtgaccattccc

SEQ ID NO: 8650 - DNA, 13 bp, Artificial Sequence
  synthetic sequence
ctttgagtcgcgg

SEQ ID NO: 8651 - DNA, 13 bp, Artificial Sequence
  synthetic sequence
caccacgcacaaa

SEQ ID NO: 8652 - DNA, 13 bp, Artificial Sequence
  synthetic sequence
tgtaaccatcaaa

SEQ ID NO: 8653 - DNA, 13 bp, Artificial Sequence
  synthetic sequence
aagatggaatcct

SEQ ID NO: 8654 - DNA, 13 bp, Artificial Sequence
  synthetic sequence
gcgttgagacctg

SEQ ID NO: 8655 - DNA, 13 bp, Artificial Sequence
  synthetic sequence
tccagaacacact

SEQ ID NO: 8656 - DNA, 13 bp, Artificial Sequence
  synthetic sequence
gtgaggatctgag

SEQ ID NO: 8657 - DNA, 13 bp, Artificial Sequence
  synthetic sequence
gctgtgccgcttg

SEQ ID NO: 8658 - DNA, 13 bp, Artificial Sequence
  synthetic sequence
tggaaccaggaca

SEQ ID NO: 8659 - DNA, 13 bp, Artificial Sequence
  synthetic sequence
atcccttctcctt

SEQ ID NO: 8660 - DNA, 13 bp, Artificial Sequence
  synthetic sequence
atcctaatagtac

SEQ ID NO: 8661 - DNA, 13 bp, Artificial Sequence
  synthetic sequence
ccatgtgctgttg

SEQ ID NO: 8662 - DNA, 13 bp, Artificial Sequence
  synthetic sequence
tgccagacccctc

SEQ ID NO: 8663 - DNA, 13 bp, Artificial Sequence
  synthetic sequence
ttagcacagtagg

SEQ ID NO: 8664 - DNA, 13 bp, Artificial Sequence
  synthetic sequence
actccaaaagagg

SEQ ID NO: 8665 - DNA, 13 bp, Artificial Sequence
  synthetic sequence
ttgtctaaagttg

SEQ ID NO: 8666 - DNA, 13 bp, Artificial Sequence
  synthetic sequence
gacacgaagcaca

SEQ ID NO: 8667 - DNA, 13 bp, Artificial Sequence
  synthetic sequence
ctgggccctcaaa

SEQ ID NO: 8668 - DNA, 13 bp, Artificial Sequence
  synthetic sequence
ttcactgtccttt

SEQ ID NO: 8669 - DNA, 13 bp, Artificial Sequence
  synthetic sequence
agtgggtgtagta

SEQ ID NO: 8670 - DNA, 13 bp, Artificial Sequence
  synthetic sequence
cagatcatcgtgg

SEQ ID NO: 8671 - DNA, 13 bp, Artificial Sequence
  synthetic sequence
actctatcactgt

SEQ ID NO: 8672 - DNA, 13 bp, Artificial Sequence
  synthetic sequence
ctaccaattgcgg

SEQ ID NO: 8673 - DNA, 13 bp, Artificial Sequence
  synthetic sequence
tctcctggaacca

SEQ ID NO: 8674 - DNA, 13 bp, Artificial Sequence
  synthetic sequence
gatgcttcaataa

SEQ ID NO: 8675 - DNA, 13 bp, Artificial Sequence
  synthetic sequence
ccatacaccccat

SEQ ID NO: 8676 - DNA, 13 bp, Artificial Sequence
  synthetic sequence
ctagttgttgtca

SEQ ID NO: 8677 - DNA, 13 bp, Artificial Sequence
  synthetic sequence
agaaattggcagc

SEQ ID NO: 8678 - DNA, 13 bp, Artificial Sequence
  synthetic sequence
gtgggcactttgg

SEQ ID NO: 8679 - DNA, 13 bp, Artificial Sequence
  synthetic sequence
agtatctgacttg

SEQ ID NO: 8680 - DNA, 13 bp, Artificial Sequence
  synthetic sequence
tccaacccttcgg

SEQ ID NO: 8681 - DNA, 13 bp, Artificial Sequence
  synthetic sequence
atcttcttctcaa

SEQ ID NO: 8682 - DNA, 13 bp, Artificial Sequence
  synthetic sequence
gcagatctacaca

SEQ ID NO: 8683 - DNA, 13 bp, Artificial Sequence
  synthetic sequence
gtggtccttggaa

SEQ ID NO: 8684 - DNA, 13 bp, Artificial Sequence
  synthetic sequence
ctgtatactggtg

SEQ ID NO: 8685 - DNA, 13 bp, Artificial Sequence
  synthetic sequence
cctcagcaagtaa

SEQ ID NO: 8686 - DNA, 13 bp, Artificial Sequence
  synthetic sequence
atcagtgttctaa

SEQ ID NO: 8687 - DNA, 13 bp, Artificial Sequence
  synthetic sequence
attggtggtacaa

SEQ ID NO: 8688 - DNA, 13 bp, Artificial Sequence
  synthetic sequence
gttggtgcattaa

SEQ ID NO: 8689 - DNA, 13 bp, Artificial Sequence
  synthetic sequence
tgggtatcctgca

SEQ ID NO: 8690 - DNA, 13 bp, Artificial Sequence
  synthetic sequence
agagctctgtgca

SEQ ID NO: 8691 - DNA, 13 bp, Artificial Sequence
  synthetic sequence
acaaatcctacaa

SEQ ID NO: 8692 - DNA, 13 bp, Artificial Sequence
  synthetic sequence
attgcatctaccc

SEQ ID NO: 8693 - DNA, 13 bp, Artificial Sequence
  synthetic sequence
ctcttagcttcag

SEQ ID NO: 8694 - DNA, 13 bp, Artificial Sequence
  synthetic sequence
cctccatcatgta

SEQ ID NO: 8695 - DNA, 13 bp, Artificial Sequence
  synthetic sequence
ctgcactgccagt

SEQ ID NO: 8696 - DNA, 13 bp, Artificial Sequence
  synthetic sequence
tgatctccctgta

SEQ ID NO: 8697 - DNA, 13 bp, Artificial Sequence
  synthetic sequence
acattatctggtg

SEQ ID NO: 8698 - DNA, 13 bp, Artificial Sequence
  synthetic sequence
ttccttcggtcca

SEQ ID NO: 8699 - DNA, 13 bp, Artificial Sequence
  synthetic sequence
tcagcaagcaaag

SEQ ID NO: 8700 - DNA, 13 bp, Artificial Sequence
  synthetic sequence
ggtgtgttgataa

SEQ ID NO: 8701 - DNA, 13 bp, Artificial Sequence
  synthetic sequence
tgacctctggcaa

SEQ ID NO: 8702 - DNA, 13 bp, Artificial Sequence
  synthetic sequence
tagcaattgtgtc

SEQ ID NO: 8703 - DNA, 13 bp, Artificial Sequence
  synthetic sequence
gagtccgggacgt

SEQ ID NO: 8704 - DNA, 13 bp, Artificial Sequence
  synthetic sequence
cacccatacctgc

SEQ ID NO: 8705 - DNA, 13 bp, Artificial Sequence
  synthetic sequence
tctccatcaagtt

SEQ ID NO: 8706 - DNA, 13 bp, Artificial Sequence
  synthetic sequence
aggaggatgctcc

SEQ ID NO: 8707 - DNA, 13 bp, Artificial Sequence
  synthetic sequence
gcttgaaatatat

SEQ ID NO: 8708 - DNA, 13 bp, Artificial Sequence
  synthetic sequence
ttcttggtggtgc

SEQ ID NO: 8709 - DNA, 13 bp, Artificial Sequence
  synthetic sequence
gtttttgggtaca

SEQ ID NO: 8710 - DNA, 13 bp, Artificial Sequence
  synthetic sequence
aaaaaggtgacat

SEQ ID NO: 8711 - DNA, 13 bp, Artificial Sequence
  synthetic sequence
tctatttactacc

SEQ ID NO: 8712 - DNA, 13 bp, Artificial Sequence
  synthetic sequence
atgtatgccctgt

SEQ ID NO: 8713 - DNA, 13 bp, Artificial Sequence
  synthetic sequence
gcgagaaatgtga

SEQ ID NO: 8714 - DNA, 13 bp, Artificial Sequence
  synthetic sequence
ccacaccccgtac

SEQ ID NO: 8715 - DNA, 13 bp, Artificial Sequence
  synthetic sequence
acaatgtaaacac

SEQ ID NO: 8716 - DNA, 13 bp, Artificial Sequence
  synthetic sequence
gtgcgccagtctt

SEQ ID NO: 8717 - DNA, 13 bp, Artificial Sequence
  synthetic sequence
gatcaggttggtt

SEQ ID NO: 8718 - DNA, 13 bp, Artificial Sequence
  synthetic sequence
gtgcactttgctc

SEQ ID NO: 8719 - DNA, 13 bp, Artificial Sequence
  synthetic sequence
tctctaggacgga

SEQ ID NO: 8720 - DNA, 13 bp, Artificial Sequence
  synthetic sequence
ccagcttcctacg

SEQ ID NO: 8721 - DNA, 13 bp, Artificial Sequence
  synthetic sequence
cgccagtttccgt

SEQ ID NO: 8722 - DNA, 13 bp, Artificial Sequence
  synthetic sequence
gctgtggtggtac

SEQ ID NO: 8723 - DNA, 13 bp, Artificial Sequence
  synthetic sequence
atccatgatcacc

SEQ ID NO: 8724 - DNA, 13 bp, Artificial Sequence
  synthetic sequence
ttcacaccctgtt

SEQ ID NO: 8725 - DNA, 13 bp, Artificial Sequence
  synthetic sequence
tgctcgcatctaa

SEQ ID NO: 8726 - DNA, 13 bp, Artificial Sequence
  synthetic sequence
aatttcttaagcc

SEQ ID NO: 8727 - DNA, 13 bp, Artificial Sequence
  synthetic sequence
ctcaccgcttcgc

SEQ ID NO: 8728 - DNA, 13 bp, Artificial Sequence
  synthetic sequence
tagattacacaag

SEQ ID NO: 8729 - DNA, 13 bp, Artificial Sequence
  synthetic sequence
taaccggacctac

SEQ ID NO: 8730 - DNA, 13 bp, Artificial Sequence
  synthetic sequence
actgttggcgcgt

SEQ ID NO: 8731 - DNA, 13 bp, Artificial Sequence
  synthetic sequence
taagtgaacattt

SEQ ID NO: 8732 - DNA, 13 bp, Artificial Sequence
  synthetic sequence
gtaaccaacaaat

SEQ ID NO: 8733 - DNA, 13 bp, Artificial Sequence
  synthetic sequence
gaggttaagaatt

SEQ ID NO: 8734 - DNA, 13 bp, Artificial Sequence
  synthetic sequence
agagcaagagtgg

SEQ ID NO: 8735 - DNA, 13 bp, Artificial Sequence
  synthetic sequence
cttcctgctatct

SEQ ID NO: 8736 - DNA, 13 bp, Artificial Sequence
  synthetic sequence
tcactgaggtagt

SEQ ID NO: 8737 - DNA, 13 bp, Artificial Sequence
  synthetic sequence
catcagttgacct

SEQ ID NO: 8738 - DNA, 13 bp, Artificial Sequence
  synthetic sequence
atttatcttttcg

SEQ ID NO: 8739 - DNA, 13 bp, Artificial Sequence
  synthetic sequence
acggttacagtaa

SEQ ID NO: 8740 - DNA, 13 bp, Artificial Sequence
  synthetic sequence
ctccatttctgag

SEQ ID NO: 8741 - DNA, 13 bp, Artificial Sequence
  synthetic sequence
tattgactagcct

SEQ ID NO: 8742 - DNA, 13 bp, Artificial Sequence
  synthetic sequence
tgtgtaataattc

SEQ ID NO: 8743 - DNA, 13 bp, Artificial Sequence
  synthetic sequence
ccgcctgttgcac

SEQ ID NO: 8744 - DNA, 13 bp, Artificial Sequence
  synthetic sequence
cttaaccgacatg

SEQ ID NO: 8745 - DNA, 13 bp, Artificial Sequence
  synthetic sequence
ctccatgaggttt

SEQ ID NO: 8746 - DNA, 13 bp, Artificial Sequence
  synthetic sequence
actacagcgcggt

SEQ ID NO: 8747 - DNA, 13 bp, Artificial Sequence
  synthetic sequence
tggccaagtgtct

SEQ ID NO: 8748 - DNA, 13 bp, Artificial Sequence
  synthetic sequence
aggccctgctgtc

SEQ ID NO: 8749 - DNA, 13 bp, Artificial Sequence
  synthetic sequence
gaaatttccacca

SEQ ID NO: 8750 - DNA, 13 bp, Artificial Sequence
  synthetic sequence
gctcgctctgctg

SEQ ID NO: 8751 - DNA, 13 bp, Artificial Sequence
  synthetic sequence
taccctgatctac

SEQ ID NO: 8752 - DNA, 13 bp, Artificial Sequence
  synthetic sequence
taactatccttgg

SEQ ID NO: 8753 - DNA, 13 bp, Artificial Sequence
  synthetic sequence
gcagccattggtg

SEQ ID NO: 8754 - DNA, 13 bp, Artificial Sequence
  synthetic sequence
atggtgcgctttg

SEQ ID NO: 8755 - DNA, 13 bp, Artificial Sequence
  synthetic sequence
tttgtcatctaca

SEQ ID NO: 8756 - DNA, 13 bp, Artificial Sequence
  synthetic sequence
gtgcattttctgc

SEQ ID NO: 8757 - DNA, 13 bp, Artificial Sequence
  synthetic sequence
cgcacgaagtagt

SEQ ID NO: 8758 - DNA, 13 bp, Artificial Sequence
  synthetic sequence
ttcttcacctcac

SEQ ID NO: 8759 - DNA, 13 bp, Artificial Sequence
  synthetic sequence
agcttccaccacc

SEQ ID NO: 8760 - DNA, 13 bp, Artificial Sequence
  synthetic sequence
acaaggatcgcac

SEQ ID NO: 8761 - DNA, 13 bp, Artificial Sequence
  synthetic sequence
ctctttctacagc

SEQ ID NO: 8762 - DNA, 13 bp, Artificial Sequence
  synthetic sequence
ggtccacttgaga

SEQ ID NO: 8763 - DNA, 13 bp, Artificial Sequence
  synthetic sequence
ttgccgaattgga

SEQ ID NO: 8764 - DNA, 13 bp, Artificial Sequence
  synthetic sequence
caaaccatacggg

SEQ ID NO: 8765 - DNA, 13 bp, Artificial Sequence
  synthetic sequence
ttgtaaactcacc

SEQ ID NO: 8766 - DNA, 13 bp, Artificial Sequence
  synthetic sequence
caccaacatgtat

SEQ ID NO: 8767 - DNA, 13 bp, Artificial Sequence
  synthetic sequence
ggccatatttgtc

SEQ ID NO: 8768 - DNA, 13 bp, Artificial Sequence
  synthetic sequence
cagtgttctgatg

SEQ ID NO: 8769 - DNA, 13 bp, Artificial Sequence
  synthetic sequence
ggaaccgactact

SEQ ID NO: 8770 - DNA, 13 bp, Artificial Sequence
  synthetic sequence
tcctagcccaatc

SEQ ID NO: 8771 - DNA, 13 bp, Artificial Sequence
  synthetic sequence
ggtgtgaagagcc

SEQ ID NO: 8772 - DNA, 13 bp, Artificial Sequence
  synthetic sequence
ttggattggccat

SEQ ID NO: 8773 - DNA, 13 bp, Artificial Sequence
  synthetic sequence
gatgagtctggac

SEQ ID NO: 8774 - DNA, 13 bp, Artificial Sequence
  synthetic sequence
aacctacaagggc

SEQ ID NO: 8775 - DNA, 13 bp, Artificial Sequence
  synthetic sequence
accaaaacaaagc

SEQ ID NO: 8776 - DNA, 13 bp, Artificial Sequence
  synthetic sequence
aatgatcacaacc

SEQ ID NO: 8777 - DNA, 13 bp, Artificial Sequence
  synthetic sequence
ccaagttcaatag

SEQ ID NO: 8778 - DNA, 13 bp, Artificial Sequence
  synthetic sequence
tgatggaattggc

SEQ ID NO: 8779 - DNA, 13 bp, Artificial Sequence
  synthetic sequence
cagacattagaga

SEQ ID NO: 8780 - DNA, 13 bp, Artificial Sequence
  synthetic sequence
tcacatgggagaa

SEQ ID NO: 8781 - DNA, 13 bp, Artificial Sequence
  synthetic sequence
ggatgcatgttgg

SEQ ID NO: 8782 - DNA, 13 bp, Artificial Sequence
  synthetic sequence
tccaagttcaccg

SEQ ID NO: 8783 - DNA, 13 bp, Artificial Sequence
  synthetic sequence
agagacctcttag

SEQ ID NO: 8784 - DNA, 13 bp, Artificial Sequence
  synthetic sequence
gtggtggcatact

SEQ ID NO: 8785 - DNA, 13 bp, Artificial Sequence
  synthetic sequence
aattatgaggaca

SEQ ID NO: 8786 - DNA, 13 bp, Artificial Sequence
  synthetic sequence
atgaaagaggcag

SEQ ID NO: 8787 - DNA, 13 bp, Artificial Sequence
  synthetic sequence
gttttgtgtcagc

SEQ ID NO: 8788 - DNA, 13 bp, Artificial Sequence
  synthetic sequence
cagtggatgagac

SEQ ID NO: 8789 - DNA, 13 bp, Artificial Sequence
  synthetic sequence
cagtatgtttgtt

SEQ ID NO: 8790 - DNA, 13 bp, Artificial Sequence
  synthetic sequence
atcaattagatgg

SEQ ID NO: 8791 - DNA, 13 bp, Artificial Sequence
  synthetic sequence
aaggaaccagcag

SEQ ID NO: 8792 - DNA, 13 bp, Artificial Sequence
  synthetic sequence
catgtgacatcct

SEQ ID NO: 8793 - DNA, 13 bp, Artificial Sequence
  synthetic sequence
accatcaattaca

SEQ ID NO: 8794 - DNA, 13 bp, Artificial Sequence
  synthetic sequence
acaacaactgggg

SEQ ID NO: 8795 - DNA, 13 bp, Artificial Sequence
  synthetic sequence
tagctaaaatcag

SEQ ID NO: 8796 - DNA, 13 bp, Artificial Sequence
  synthetic sequence
tgagagattactg

SEQ ID NO: 8797 - DNA, 13 bp, Artificial Sequence
  synthetic sequence
tggctactgaaat

SEQ ID NO: 8798 - DNA, 13 bp, Artificial Sequence
  synthetic sequence
gtggctcacagtg

SEQ ID NO: 8799 - DNA, 13 bp, Artificial Sequence
  synthetic sequence
tttctttcattgg

SEQ ID NO: 8800 - DNA, 13 bp, Artificial Sequence
  synthetic sequence
atggtaactagca

SEQ ID NO: 8801 - DNA, 13 bp, Artificial Sequence
  synthetic sequence
catacagacaaac

SEQ ID NO: 8802 - DNA, 13 bp, Artificial Sequence
  synthetic sequence
ccaggtgttgatt

SEQ ID NO: 8803 - DNA, 13 bp, Artificial Sequence
  synthetic sequence
taaaagacatggg

SEQ ID NO: 8804 - DNA, 13 bp, Artificial Sequence
  synthetic sequence
gcgtgcaggttct

SEQ ID NO: 8805 - DNA, 13 bp, Artificial Sequence
  synthetic sequence
ggtccttgaaatt

SEQ ID NO: 8806 - DNA, 13 bp, Artificial Sequence
  synthetic sequence
caatgcttgggac

SEQ ID NO: 8807 - DNA, 13 bp, Artificial Sequence
  synthetic sequence
aagtttcatcaag

SEQ ID NO: 8808 - DNA, 13 bp, Artificial Sequence
  synthetic sequence
tcgggagtggagt

SEQ ID NO: 8809 - DNA, 13 bp, Artificial Sequence
  synthetic sequence
aaatcactgagac

SEQ ID NO: 8810 - DNA, 13 bp, Artificial Sequence
  synthetic sequence
tgaccattgctcc

SEQ ID NO: 8811 - DNA, 13 bp, Artificial Sequence
  synthetic sequence
tttggaaaataac

SEQ ID NO: 8812 - DNA, 13 bp, Artificial Sequence
  synthetic sequence
ttgagtcattctt

SEQ ID NO: 8813 - DNA, 13 bp, Artificial Sequence
  synthetic sequence
cttgtgtctctcg

SEQ ID NO: 8814 - DNA, 13 bp, Artificial Sequence
  synthetic sequence
tggagacaggggc

SEQ ID NO: 8815 - DNA, 13 bp, Artificial Sequence
  synthetic sequence
ttcagttaatgga

SEQ ID NO: 8816 - DNA, 13 bp, Artificial Sequence
  synthetic sequence
agtaaccagtacc

SEQ ID NO: 8817 - DNA, 13 bp, Artificial Sequence
  synthetic sequence
ctaaaaatgcatt

SEQ ID NO: 8818 - DNA, 13 bp, Artificial Sequence
  synthetic sequence
tctcactttgatg

SEQ ID NO: 8819 - DNA, 13 bp, Artificial Sequence
  synthetic sequence
tatccaaattcat

SEQ ID NO: 8820 - DNA, 13 bp, Artificial Sequence
  synthetic sequence
acgtggcagacgt

SEQ ID NO: 8821 - DNA, 13 bp, Artificial Sequence
  synthetic sequence
aatccaggcgaaa

SEQ ID NO: 8822 - DNA, 13 bp, Artificial Sequence
  synthetic sequence
gatgggtttgcaa

SEQ ID NO: 8823 - DNA, 13 bp, Artificial Sequence
  synthetic sequence
atcaccacccaag

SEQ ID NO: 8824 - DNA, 13 bp, Artificial Sequence
  synthetic sequence
catgcattgaacc

SEQ ID NO: 8825 - DNA, 13 bp, Artificial Sequence
  synthetic sequence
acaaaaacccagg

SEQ ID NO: 8826 - DNA, 13 bp, Artificial Sequence
  synthetic sequence
atccgttacccgc

SEQ ID NO: 8827 - DNA, 13 bp, Artificial Sequence
  synthetic sequence
aattgcatggaag

SEQ ID NO: 8828 - DNA, 13 bp, Artificial Sequence
  synthetic sequence
ttttgtcaaatgg

SEQ ID NO: 8829 - DNA, 13 bp, Artificial Sequence
  synthetic sequence
cttgtccaagtca

SEQ ID NO: 8830 - DNA, 13 bp, Artificial Sequence
  synthetic sequence
gtgctgtgactga

SEQ ID NO: 8831 - DNA, 13 bp, Artificial Sequence
  synthetic sequence
aaaacatactgtg

SEQ ID NO: 8832 - DNA, 13 bp, Artificial Sequence
  synthetic sequence
agaggtttgcacc

SEQ ID NO: 8833 - DNA, 13 bp, Artificial Sequence
  synthetic sequence
ccaattaatcaaa

SEQ ID NO: 8834 - DNA, 13 bp, Artificial Sequence
  synthetic sequence
gtgctgtgaccga

SEQ ID NO: 8835 - DNA, 13 bp, Artificial Sequence
  synthetic sequence
acagggtatgatg

SEQ ID NO: 8836 - DNA, 13 bp, Artificial Sequence
  synthetic sequence
tgattgacaacac

SEQ ID NO: 8837 - DNA, 13 bp, Artificial Sequence
  synthetic sequence
aaaccagagacac

SEQ ID NO: 8838 - DNA, 13 bp, Artificial Sequence
  synthetic sequence
gttacagcaacta

SEQ ID NO: 8839 - DNA, 13 bp, Artificial Sequence
  synthetic sequence
tccagtcaccgtg

SEQ ID NO: 8840 - DNA, 13 bp, Artificial Sequence
  synthetic sequence
catgtgatctggg

SEQ ID NO: 8841 - DNA, 13 bp, Artificial Sequence
  synthetic sequence
ctagagacaccaa

SEQ ID NO: 8842 - DNA, 13 bp, Artificial Sequence
  synthetic sequence
acactgggaaact

SEQ ID NO: 8843 - DNA, 13 bp, Artificial Sequence
  synthetic sequence
gggacatgggact

SEQ ID NO: 8844 - DNA, 13 bp, Artificial Sequence
  synthetic sequence
actccaaggaaat

SEQ ID NO: 8845 - DNA, 13 bp, Artificial Sequence
  synthetic sequence
catcaaatccatc

SEQ ID NO: 8846 - DNA, 13 bp, Artificial Sequence
  synthetic sequence
actgggcaggatc

SEQ ID NO: 8847 - DNA, 13 bp, Artificial Sequence
  synthetic sequence
ttatgtacttcga

SEQ ID NO: 8848 - DNA, 13 bp, Artificial Sequence
  synthetic sequence
cagtgtggaagat

SEQ ID NO: 8849 - DNA, 13 bp, Artificial Sequence
  synthetic sequence
tactctgcctgtc

SEQ ID NO: 8850 - DNA, 13 bp, Artificial Sequence
  synthetic sequence
ggtcagagtctag

SEQ ID NO: 8851 - DNA, 13 bp, Artificial Sequence
  synthetic sequence
cgtaccagagatg

SEQ ID NO: 8852 - DNA, 13 bp, Artificial Sequence
  synthetic sequence
caaaccatagatg

SEQ ID NO: 8853 - DNA, 13 bp, Artificial Sequence
  synthetic sequence
gccaatcctggcg

SEQ ID NO: 8854 - DNA, 13 bp, Artificial Sequence
  synthetic sequence
ttttccaaagtac

SEQ ID NO: 8855 - DNA, 13 bp, Artificial Sequence
  synthetic sequence
gtgacaaccttcg

SEQ ID NO: 8856 - DNA, 13 bp, Artificial Sequence
  synthetic sequence
aacaatgggcatg

SEQ ID NO: 8857 - DNA, 13 bp, Artificial Sequence
  synthetic sequence
ttggaaatggcac

SEQ ID NO: 8858 - DNA, 13 bp, Artificial Sequence
  synthetic sequence
tcctacaagcagt

SEQ ID NO: 8859 - DNA, 13 bp, Artificial Sequence
  synthetic sequence
gtcgctgcatgca

SEQ ID NO: 8860 - DNA, 13 bp, Artificial Sequence
  synthetic sequence
acaataattgggg

SEQ ID NO: 8861 - DNA, 13 bp, Artificial Sequence
  synthetic sequence
gtgcccaccatta

SEQ ID NO: 8862 - DNA, 13 bp, Artificial Sequence
  synthetic sequence
tgtacaaaaacaa

SEQ ID NO: 8863 - DNA, 13 bp, Artificial Sequence
  synthetic sequence
acaaacaacaggg

SEQ ID NO: 8864 - DNA, 13 bp, Artificial Sequence
  synthetic sequence
agggaaaatccag

SEQ ID NO: 8865 - DNA, 13 bp, Artificial Sequence
  synthetic sequence
tggatgccaaagc

SEQ ID NO: 8866 - DNA, 13 bp, Artificial Sequence
  synthetic sequence
gccctagtcagga

SEQ ID NO: 8867 - DNA, 13 bp, Artificial Sequence
  synthetic sequence
tggtttgaggcac

SEQ ID NO: 8868 - DNA, 13 bp, Artificial Sequence
  synthetic sequence
aatactacccagt

SEQ ID NO: 8869 - DNA, 13 bp, Artificial Sequence
  synthetic sequence
atgccatgtatgg

SEQ ID NO: 8870 - DNA, 13 bp, Artificial Sequence
  synthetic sequence
taatggacaaatc

SEQ ID NO: 8871 - DNA, 13 bp, Artificial Sequence
  synthetic sequence
ccatgtacggcac

SEQ ID NO: 8872 - DNA, 13 bp, Artificial Sequence
  synthetic sequence
ccaccattaatta

SEQ ID NO: 8873 - DNA, 13 bp, Artificial Sequence
  synthetic sequence
tgaccatagcccc

SEQ ID NO: 8874 - DNA, 13 bp, Artificial Sequence
  synthetic sequence
tttcaacagttat

SEQ ID NO: 8875 - DNA, 13 bp, Artificial Sequence
  synthetic sequence
ttcagagatatca

SEQ ID NO: 8876 - DNA, 13 bp, Artificial Sequence
  synthetic sequence
ttacagcaaccac

SEQ ID NO: 8877 - DNA, 13 bp, Artificial Sequence
  synthetic sequence
tagctaaaattag

SEQ ID NO: 8878 - DNA, 13 bp, Artificial Sequence
  synthetic sequence
aacgacccaatgt

SEQ ID NO: 8879 - DNA, 13 bp, Artificial Sequence
  synthetic sequence
caatcagatggac

SEQ ID NO: 8880 - DNA, 13 bp, Artificial Sequence
  synthetic sequence
aggggaaatccag

SEQ ID NO: 8881 - DNA, 13 bp, Artificial Sequence
  synthetic sequence
attcaatggatga

SEQ ID NO: 8882 - DNA, 13 bp, Artificial Sequence
  synthetic sequence
attgtatggaggc

SEQ ID NO: 8883 - DNA, 13 bp, Artificial Sequence
  synthetic sequence
aaggagaaaatta

SEQ ID NO: 8884 - DNA, 13 bp, Artificial Sequence
  synthetic sequence
gtggaaattcttg

SEQ ID NO: 8885 - DNA, 13 bp, Artificial Sequence
  synthetic sequence
gtggcacacagtg

SEQ ID NO: 8886 - DNA, 13 bp, Artificial Sequence
  synthetic sequence
tctgccaaatggt

SEQ ID NO: 8887 - DNA, 13 bp, Artificial Sequence
  synthetic sequence
gtgaaaagaaagg

SEQ ID NO: 8888 - DNA, 13 bp, Artificial Sequence
  synthetic sequence
aaagaatacagaa

SEQ ID NO: 8889 - DNA, 13 bp, Artificial Sequence
  synthetic sequence
cagatggtatcaa

SEQ ID NO: 8890 - DNA, 13 bp, Artificial Sequence
  synthetic sequence
ccagtatgtttgc

SEQ ID NO: 8891 - DNA, 13 bp, Artificial Sequence
  synthetic sequence
gagatgtgcaaaa

SEQ ID NO: 8892 - DNA, 13 bp, Artificial Sequence
  synthetic sequence
aaagaaccagcag

SEQ ID NO: 8893 - DNA, 13 bp, Artificial Sequence
  synthetic sequence
tcacaatgcttgg

SEQ ID NO: 8894 - DNA, 13 bp, Artificial Sequence
  synthetic sequence
acgccatgtatgg

SEQ ID NO: 8895 - DNA, 13 bp, Artificial Sequence
  synthetic sequence
tatgaagacacca

SEQ ID NO: 8896 - DNA, 13 bp, Artificial Sequence
  synthetic sequence
actggtagtgcag

SEQ ID NO: 8897 - DNA, 13 bp, Artificial Sequence
  synthetic sequence
agaacagcaaaag

SEQ ID NO: 8898 - DNA, 13 bp, Artificial Sequence
  synthetic sequence
aaataacagagtt

SEQ ID NO: 8899 - DNA, 13 bp, Artificial Sequence
  synthetic sequence
gtaacattcttga

SEQ ID NO: 8900 - DNA, 13 bp, Artificial Sequence
  synthetic sequence
atccgttatccgc

SEQ ID NO: 8901 - DNA, 13 bp, Artificial Sequence
  synthetic sequence
gatgagtacatga

SEQ ID NO: 8902 - DNA, 13 bp, Artificial Sequence
  synthetic sequence
taattgaagcctc

SEQ ID NO: 8903 - DNA, 13 bp, Artificial Sequence
  synthetic sequence
ttggtttcgtgtc

SEQ ID NO: 8904 - DNA, 13 bp, Artificial Sequence
  synthetic sequence
ctggagatacctt

SEQ ID NO: 8905 - DNA, 13 bp, Artificial Sequence
  synthetic sequence
atgcaatgtatgg

SEQ ID NO: 8906 - DNA, 13 bp, Artificial Sequence
  synthetic sequence
ctgttggttgtga

SEQ ID NO: 8907 - DNA, 13 bp, Artificial Sequence
  synthetic sequence
tgtatgcacttga

SEQ ID NO: 8908 - DNA, 13 bp, Artificial Sequence
  synthetic sequence
ccttagaagacca

SEQ ID NO: 8909 - DNA, 13 bp, Artificial Sequence
  synthetic sequence
aacacccaggatc

SEQ ID NO: 8910 - DNA, 13 bp, Artificial Sequence
  synthetic sequence
ggcaactgcatgg

SEQ ID NO: 8911 - DNA, 13 bp, Artificial Sequence
  synthetic sequence
tcatcgggatgca

SEQ ID NO: 8912 - DNA, 13 bp, Artificial Sequence
  synthetic sequence
gagcaatgaccat

SEQ ID NO: 8913 - DNA, 13 bp, Artificial Sequence
  synthetic sequence
ccagcttggtttg

SEQ ID NO: 8914 - DNA, 13 bp, Artificial Sequence
  synthetic sequence
gattgattgaagc

SEQ ID NO: 8915 - DNA, 13 bp, Artificial Sequence
  synthetic sequence
tcagtgtgcgctt

SEQ ID NO: 8916 - DNA, 13 bp, Artificial Sequence
  synthetic sequence
gatgaatacatga

SEQ ID NO: 8917 - DNA, 13 bp, Artificial Sequence
  synthetic sequence
tgagttcaatgga

SEQ ID NO: 8918 - DNA, 13 bp, Artificial Sequence
  synthetic sequence
gtcaaggtgaaat

SEQ ID NO: 8919 - DNA, 13 bp, Artificial Sequence
  synthetic sequence
taaccagcatggt

SEQ ID NO: 8920 - DNA, 13 bp, Artificial Sequence
  synthetic sequence
ccaggagattgtg

SEQ ID NO: 8921 - DNA, 13 bp, Artificial Sequence
  synthetic sequence
agttcagagacat

SEQ ID NO: 8922 - DNA, 13 bp, Artificial Sequence
  synthetic sequence
tgtggaacagaga

SEQ ID NO: 8923 - DNA, 13 bp, Artificial Sequence
  synthetic sequence
ttgatggcaaaga

SEQ ID NO: 8924 - DNA, 13 bp, Artificial Sequence
  synthetic sequence
actgtgagaagaa

SEQ ID NO: 8925 - DNA, 13 bp, Artificial Sequence
  synthetic sequence
gaagcgtgccaat

SEQ ID NO: 8926 - DNA, 13 bp, Artificial Sequence
  synthetic sequence
acatgatggaact

SEQ ID NO: 8927 - DNA, 13 bp, Artificial Sequence
  synthetic sequence
gaaatgtgtaaga

SEQ ID NO: 8928 - DNA, 13 bp, Artificial Sequence
  synthetic sequence
accaaagaaatgc

SEQ ID NO: 8929 - DNA, 13 bp, Artificial Sequence
  synthetic sequence
gcagacaattacc

SEQ ID NO: 8930 - DNA, 13 bp, Artificial Sequence
  synthetic sequence
atcacaccaccca

SEQ ID NO: 8931 - DNA, 13 bp, Artificial Sequence
  synthetic sequence
gggtacaaaccag

SEQ ID NO: 8932 - DNA, 13 bp, Artificial Sequence
  synthetic sequence
atggtcaccagca

SEQ ID NO: 8933 - DNA, 13 bp, Artificial Sequence
  synthetic sequence
aacccattaagga

SEQ ID NO: 8934 - DNA, 13 bp, Artificial Sequence
  synthetic sequence
accagtatgtcta

SEQ ID NO: 8935 - DNA, 13 bp, Artificial Sequence
  synthetic sequence
accaaggaaatgc

SEQ ID NO: 8936 - DNA, 13 bp, Artificial Sequence
  synthetic sequence
attgggcaggatc

SEQ ID NO: 8937 - DNA, 13 bp, Artificial Sequence
  synthetic sequence
aactgtatggaag

SEQ ID NO: 8938 - DNA, 13 bp, Artificial Sequence
  synthetic sequence
tcgttggcccaac

SEQ ID NO: 8939 - DNA, 13 bp, Artificial Sequence
  synthetic sequence
gagtgtagcttag

SEQ ID NO: 8940 - DNA, 13 bp, Artificial Sequence
  synthetic sequence
attcagttgatgg

SEQ ID NO: 8941 - DNA, 13 bp, Artificial Sequence
  synthetic sequence
atgtgatttggga

SEQ ID NO: 8942 - DNA, 13 bp, Artificial Sequence
  synthetic sequence
ggaaaatcacgta

SEQ ID NO: 8943 - DNA, 13 bp, Artificial Sequence
  synthetic sequence
cccaacaagaaac

SEQ ID NO: 8944 - DNA, 13 bp, Artificial Sequence
  synthetic sequence
aggaagtggaagt

SEQ ID NO: 8945 - DNA, 13 bp, Artificial Sequence
  synthetic sequence
atgcaatgtacgg

SEQ ID NO: 8946 - DNA, 13 bp, Artificial Sequence
  synthetic sequence
caggttatgatgc

SEQ ID NO: 8947 - DNA, 13 bp, Artificial Sequence
  synthetic sequence
cgatcagagtcca

SEQ ID NO: 8948 - DNA, 13 bp, Artificial Sequence
  synthetic sequence
gtgagaaaaaggg

SEQ ID NO: 8949 - DNA, 13 bp, Artificial Sequence
  synthetic sequence
acttttacgacgg

SEQ ID NO: 8950 - DNA, 13 bp, Artificial Sequence
  synthetic sequence
atcaccactcaag

SEQ ID NO: 8951 - DNA, 13 bp, Artificial Sequence
  synthetic sequence
tagtgcatggcag

SEQ ID NO: 8952 - DNA, 13 bp, Artificial Sequence
  synthetic sequence
acttctatgacgg

SEQ ID NO: 8953 - DNA, 13 bp, Artificial Sequence
  synthetic sequence
taacaggttcagc

SEQ ID NO: 8954 - DNA, 13 bp, Artificial Sequence
  synthetic sequence
acatggcaatggc

SEQ ID NO: 8955 - DNA, 13 bp, Artificial Sequence
  synthetic sequence
ccacaatacacca

SEQ ID NO: 8956 - DNA, 13 bp, Artificial Sequence
  synthetic sequence
ctaccattaatta

SEQ ID NO: 8957 - DNA, 13 bp, Artificial Sequence
  synthetic sequence
aacatggcgatgg

SEQ ID NO: 8958 - DNA, 13 bp, Artificial Sequence
  synthetic sequence
tacaagcaacagg

SEQ ID NO: 8959 - DNA, 13 bp, Artificial Sequence
  synthetic sequence
aacaaaatctcaa

SEQ ID NO: 8960 - DNA, 13 bp, Artificial Sequence
  synthetic sequence
atagacaccatga

SEQ ID NO: 8961 - DNA, 13 bp, Artificial Sequence
  synthetic sequence
tggtcacctcaaa

SEQ ID NO: 8962 - DNA, 13 bp, Artificial Sequence
  synthetic sequence
caatattttacac

SEQ ID NO: 8963 - DNA, 13 bp, Artificial Sequence
  synthetic sequence
aaagaacccgcag

SEQ ID NO: 8964 - DNA, 13 bp, Artificial Sequence
  synthetic sequence
gtcagatggtttc

SEQ ID NO: 8965 - DNA, 13 bp, Artificial Sequence
  synthetic sequence
agtttagagacat

SEQ ID NO: 8966 - DNA, 13 bp, Artificial Sequence
  synthetic sequence
gacatgggattgt

SEQ ID NO: 8967 - DNA, 13 bp, Artificial Sequence
  synthetic sequence
tctaagtacaatt

SEQ ID NO: 8968 - DNA, 13 bp, Artificial Sequence
  synthetic sequence
tcccgtatgttat

SEQ ID NO: 8969 - DNA, 13 bp, Artificial Sequence
  synthetic sequence
aatccaggtgaaa

SEQ ID NO: 8970 - DNA, 13 bp, Artificial Sequence
  synthetic sequence
tctgtcaaatggt

SEQ ID NO: 8971 - DNA, 13 bp, Artificial Sequence
  synthetic sequence
attgtgagaagaa

SEQ ID NO: 8972 - DNA, 13 bp, Artificial Sequence
  synthetic sequence
acggaaaccaaca

SEQ ID NO: 8973 - DNA, 13 bp, Artificial Sequence
  synthetic sequence
gcagttaccactt

SEQ ID NO: 8974 - DNA, 13 bp, Artificial Sequence
  synthetic sequence
ggttgtgacccag

SEQ ID NO: 8975 - DNA, 13 bp, Artificial Sequence
  synthetic sequence
gagacttgtatgc

SEQ ID NO: 8976 - DNA, 13 bp, Artificial Sequence
  synthetic sequence
ttgatggaaagga

SEQ ID NO: 8977 - DNA, 13 bp, Artificial Sequence
  synthetic sequence
ggtgtgtttgctg

SEQ ID NO: 8978 - DNA, 13 bp, Artificial Sequence
  synthetic sequence
tggtaactgcatg

SEQ ID NO: 8979 - DNA, 13 bp, Artificial Sequence
  synthetic sequence
tcaactacaccac

SEQ ID NO: 8980 - DNA, 13 bp, Artificial Sequence
  synthetic sequence
tggtttgaggctc

SEQ ID NO: 8981 - DNA, 13 bp, Artificial Sequence
  synthetic sequence
atatggcaatggc

SEQ ID NO: 8982 - DNA, 13 bp, Artificial Sequence
  synthetic sequence
cttccaacccgtc

SEQ ID NO: 8983 - DNA, 13 bp, Artificial Sequence
  synthetic sequence
actgaagtggatg

SEQ ID NO: 8984 - DNA, 13 bp, Artificial Sequence
  synthetic sequence
atgaccacaaccc

SEQ ID NO: 8985 - DNA, 13 bp, Artificial Sequence
  synthetic sequence
attgtatggaagc

SEQ ID NO: 8986 - DNA, 13 bp, Artificial Sequence
  synthetic sequence
attgattggctaa

SEQ ID NO: 8987 - DNA, 13 bp, Artificial Sequence
  synthetic sequence
ctatggagcaggg

SEQ ID NO: 8988 - DNA, 13 bp, Artificial Sequence
  synthetic sequence
tacaaacaacaag

SEQ ID NO: 8989 - DNA, 13 bp, Artificial Sequence
  synthetic sequence
cttgaaagcatga

SEQ ID NO: 8990 - DNA, 13 bp, Artificial Sequence
  synthetic sequence
acaataactgggg

SEQ ID NO: 8991 - DNA, 13 bp, Artificial Sequence
  synthetic sequence
aaggggagttcac

SEQ ID NO: 8992 - DNA, 13 bp, Artificial Sequence
  synthetic sequence
ggtgagaaggggg

SEQ ID NO: 8993 - DNA, 13 bp, Artificial Sequence
  synthetic sequence
gactgattgaagc

SEQ ID NO: 8994 - DNA, 13 bp, Artificial Sequence
  synthetic sequence
gtggaccaaccaa

SEQ ID NO: 8995 - DNA, 13 bp, Artificial Sequence
  synthetic sequence
gttacaaaatttg

SEQ ID NO: 8996 - DNA, 13 bp, Artificial Sequence
  synthetic sequence
ccaactccagtcg

SEQ ID NO: 8997 - DNA, 13 bp, Artificial Sequence
  synthetic sequence
tataaacaacagg

SEQ ID NO: 8998 - DNA, 13 bp, Artificial Sequence
  synthetic sequence
gtttcactgaggg

SEQ ID NO: 8999 - DNA, 13 bp, Artificial Sequence
  synthetic sequence
gggtttgtgtcag

SEQ ID NO: 9000 - DNA, 13 bp, Artificial Sequence
  synthetic sequence
gtgacattctgga

SEQ ID NO: 9001 - DNA, 13 bp, Artificial Sequence
  synthetic sequence
agacatactgtgt

SEQ ID NO: 9002 - DNA, 13 bp, Artificial Sequence
  synthetic sequence
ataagaacccagg

SEQ ID NO: 9003 - DNA, 13 bp, Artificial Sequence
  synthetic sequence
aaacaacaatact

SEQ ID NO: 9004 - DNA, 13 bp, Artificial Sequence
  synthetic sequence
tccctgcgctcac

SEQ ID NO: 9005 - DNA, 13 bp, Artificial Sequence
  synthetic sequence
agggtggttaatg

SEQ ID NO: 9006 - DNA, 13 bp, Artificial Sequence
  synthetic sequence
caaattgcaacca

SEQ ID NO: 9007 - DNA, 13 bp, Artificial Sequence
  synthetic sequence
atagctccaatgt

SEQ ID NO: 9008 - DNA, 13 bp, Artificial Sequence
  synthetic sequence
ccaggagactgtg

SEQ ID NO: 9009 - DNA, 13 bp, Artificial Sequence
  synthetic sequence
ccaacgtgcccac

SEQ ID NO: 9010 - DNA, 13 bp, Artificial Sequence
  synthetic sequence
gtggcacatagtg

SEQ ID NO: 9011 - DNA, 13 bp, Artificial Sequence
  synthetic sequence
ttccaatacatgg

SEQ ID NO: 9012 - DNA, 13 bp, Artificial Sequence
  synthetic sequence
gacctacaagggc

SEQ ID NO: 9013 - DNA, 13 bp, Artificial Sequence
  synthetic sequence
tacgcacttgagg

SEQ ID NO: 9014 - DNA, 13 bp, Artificial Sequence
  synthetic sequence
cgtttgtgttccc

SEQ ID NO: 9015 - DNA, 13 bp, Artificial Sequence
  synthetic sequence
gaattcacgatgc

SEQ ID NO: 9016 - DNA, 13 bp, Artificial Sequence
  synthetic sequence
tcgttatcaccag

SEQ ID NO: 9017 - DNA, 13 bp, Artificial Sequence
  synthetic sequence
acaagttcaatag

SEQ ID NO: 9018 - DNA, 13 bp, Artificial Sequence
  synthetic sequence
cagcaaatagggg

SEQ ID NO: 9019 - DNA, 13 bp, Artificial Sequence
  synthetic sequence
aaattcaccgagc

SEQ ID NO: 9020 - DNA, 13 bp, Artificial Sequence
  synthetic sequence
tgtggaacaggga

SEQ ID NO: 9021 - DNA, 13 bp, Artificial Sequence
  synthetic sequence
ccaaaaacgaccc

SEQ ID NO: 9022 - DNA, 13 bp, Artificial Sequence
  synthetic sequence
agcaagggtacct

SEQ ID NO: 9023 - DNA, 13 bp, Artificial Sequence
  synthetic sequence
caattgatggaca

SEQ ID NO: 9024 - DNA, 13 bp, Artificial Sequence
  synthetic sequence
tcccgcaccagat

SEQ ID NO: 9025 - DNA, 13 bp, Artificial Sequence
  synthetic sequence
ttgttgctccctg

SEQ ID NO: 9026 - DNA, 13 bp, Artificial Sequence
  synthetic sequence
gcctggtttgaag

SEQ ID NO: 9027 - DNA, 13 bp, Artificial Sequence
  synthetic sequence
gcgagttcaacgg

SEQ ID NO: 9028 - DNA, 13 bp, Artificial Sequence
  synthetic sequence
gcgtgcagattct

SEQ ID NO: 9029 - DNA, 13 bp, Artificial Sequence
  synthetic sequence
gcataatatccat

SEQ ID NO: 9030 - DNA, 13 bp, Artificial Sequence
  synthetic sequence
tcggtgttttaca

SEQ ID NO: 9031 - DNA, 13 bp, Artificial Sequence
  synthetic sequence
aaatttcaccaag

SEQ ID NO: 9032 - DNA, 13 bp, Artificial Sequence
  synthetic sequence
gattgtggtggta

SEQ ID NO: 9033 - DNA, 13 bp, Artificial Sequence
  synthetic sequence
gcagcagttgctg

SEQ ID NO: 9034 - DNA, 13 bp, Artificial Sequence
  synthetic sequence
ccaaagagatgca

SEQ ID NO: 9035 - DNA, 13 bp, Artificial Sequence
  synthetic sequence
ggatttcagtgtc

SEQ ID NO: 9036 - DNA, 13 bp, Artificial Sequence
  synthetic sequence
aaagtaccactag

SEQ ID NO: 9037 - DNA, 13 bp, Artificial Sequence
  synthetic sequence
tcacaaccccacg

SEQ ID NO: 9038 - DNA, 13 bp, Artificial Sequence
  synthetic sequence
aaggaaatgcaaa

SEQ ID NO: 9039 - DNA, 13 bp, Artificial Sequence
  synthetic sequence
aggaggcagcaaa

SEQ ID NO: 9040 - DNA, 13 bp, Artificial Sequence
  synthetic sequence
catcaacgatagt

SEQ ID NO: 9041 - DNA, 13 bp, Artificial Sequence
  synthetic sequence
tacctttctcttt

SEQ ID NO: 9042 - DNA, 13 bp, Artificial Sequence
  synthetic sequence
ctctgggcaattc

SEQ ID NO: 9043 - DNA, 13 bp, Artificial Sequence
  synthetic sequence
ttgatggtaaaga

SEQ ID NO: 9044 - DNA, 13 bp, Artificial Sequence
  synthetic sequence
ctcacagcaacca

SEQ ID NO: 9045 - DNA, 13 bp, Artificial Sequence
  synthetic sequence
aataatgggcatg

SEQ ID NO: 9046 - DNA, 13 bp, Artificial Sequence
  synthetic sequence
acaacaattgggg

SEQ ID NO: 9047 - DNA, 13 bp, Artificial Sequence
  synthetic sequence
accaagaatgacc

SEQ ID NO: 9048 - DNA, 13 bp, Artificial Sequence
  synthetic sequence
caaaaaggattca

SEQ ID NO: 9049 - DNA, 13 bp, Artificial Sequence
  synthetic sequence
gaacagggatatc

SEQ ID NO: 9050 - DNA, 13 bp, Artificial Sequence
  synthetic sequence
ccaccatacacca

SEQ ID NO: 9051 - DNA, 13 bp, Artificial Sequence
  synthetic sequence
gaatgcatgttgg

SEQ ID NO: 9052 - DNA, 13 bp, Artificial Sequence
  synthetic sequence
acaagaatccagg

SEQ ID NO: 9053 - DNA, 13 bp, Artificial Sequence
  synthetic sequence
tgacaattctaca

SEQ ID NO: 9054 - DNA, 13 bp, Artificial Sequence
  synthetic sequence
ccaccatcagaac

SEQ ID NO: 9055 - DNA, 13 bp, Artificial Sequence
  synthetic sequence
catacaaagatac

SEQ ID NO: 9056 - DNA, 13 bp, Artificial Sequence
  synthetic sequence
gcactcactgcag

SEQ ID NO: 9057 - DNA, 13 bp, Artificial Sequence
  synthetic sequence
ctggaaattccat

SEQ ID NO: 9058 - DNA, 13 bp, Artificial Sequence
  synthetic sequence
tccagttgatgga

SEQ ID NO: 9059 - DNA, 13 bp, Artificial Sequence
  synthetic sequence
acccacatcaaat

SEQ ID NO: 9060 - DNA, 13 bp, Artificial Sequence
  synthetic sequence
tgccaccagatcc

SEQ ID NO: 9061 - DNA, 13 bp, Artificial Sequence
  synthetic sequence
gcagtcccatact

SEQ ID NO: 9062 - DNA, 13 bp, Artificial Sequence
  synthetic sequence
ttgatggcaagga

SEQ ID NO: 9063 - DNA, 13 bp, Artificial Sequence
  synthetic sequence
atgtacggaactg

SEQ ID NO: 9064 - DNA, 13 bp, Artificial Sequence
  synthetic sequence
ccacaatagaatc

SEQ ID NO: 9065 - DNA, 13 bp, Artificial Sequence
  synthetic sequence
cagactagagaca

SEQ ID NO: 9066 - DNA, 13 bp, Artificial Sequence
  synthetic sequence
gattgatagaagc

SEQ ID NO: 9067 - DNA, 13 bp, Artificial Sequence
  synthetic sequence
agatggtgtccac

SEQ ID NO: 9068 - DNA, 13 bp, Artificial Sequence
  synthetic sequence
gctgtgacccaga

SEQ ID NO: 9069 - DNA, 13 bp, Artificial Sequence
  synthetic sequence
cttgtcactatcc

SEQ ID NO: 9070 - DNA, 13 bp, Artificial Sequence
  synthetic sequence
aaatccaggttga

SEQ ID NO: 9071 - DNA, 13 bp, Artificial Sequence
  synthetic sequence
cccaccagccgta

SEQ ID NO: 9072 - DNA, 13 bp, Artificial Sequence
  synthetic sequence
caagacttattga

SEQ ID NO: 9073 - DNA, 13 bp, Artificial Sequence
  synthetic sequence
attaccaggaact

SEQ ID NO: 9074 - DNA, 13 bp, Artificial Sequence
  synthetic sequence
cacatgggaaaat

SEQ ID NO: 9075 - DNA, 13 bp, Artificial Sequence
  synthetic sequence
gtctgtttggaca

SEQ ID NO: 9076 - DNA, 13 bp, Artificial Sequence
  synthetic sequence
aggagatacctgc

SEQ ID NO: 9077 - DNA, 13 bp, Artificial Sequence
  synthetic sequence
cgccctaactttg

SEQ ID NO: 9078 - DNA, 13 bp, Artificial Sequence
  synthetic sequence
gcccctctttacg

SEQ ID NO: 9079 - DNA, 13 bp, Artificial Sequence
  synthetic sequence
caatgtccctacc

SEQ ID NO: 9080 - DNA, 13 bp, Artificial Sequence
  synthetic sequence
acaagaacccagg

SEQ ID NO: 9081 - DNA, 13 bp, Artificial Sequence
  synthetic sequence
tcgacaccatgat

SEQ ID NO: 9082 - DNA, 13 bp, Artificial Sequence
  synthetic sequence
ggtgagaaaggag

SEQ ID NO: 9083 - DNA, 13 bp, Artificial Sequence
  synthetic sequence
caaattggagaca

SEQ ID NO: 9084 - DNA, 13 bp, Artificial Sequence
  synthetic sequence
taccaccacagtg

SEQ ID NO: 9085 - DNA, 13 bp, Artificial Sequence
  synthetic sequence
aacaatggacatg

SEQ ID NO: 9086 - DNA, 13 bp, Artificial Sequence
  synthetic sequence
cagtatgtttatt

SEQ ID NO: 9087 - DNA, 13 bp, Artificial Sequence
  synthetic sequence
cactaccacagtg

SEQ ID NO: 9088 - DNA, 13 bp, Artificial Sequence
  synthetic sequence
atccagtggatca

SEQ ID NO: 9089 - DNA, 13 bp, Artificial Sequence
  synthetic sequence
ctgtgaaaagaag

SEQ ID NO: 9090 - DNA, 13 bp, Artificial Sequence
  synthetic sequence
tgtggaatagaga

SEQ ID NO: 9091 - DNA, 13 bp, Artificial Sequence
  synthetic sequence
cagttccagaaat

SEQ ID NO: 9092 - DNA, 13 bp, Artificial Sequence
  synthetic sequence
tgtgaattcaatg

SEQ ID NO: 9093 - DNA, 13 bp, Artificial Sequence
  synthetic sequence
ggagactgcggtg

SEQ ID NO: 9094 - DNA, 13 bp, Artificial Sequence
  synthetic sequence
agtttagagatat

SEQ ID NO: 9095 - DNA, 13 bp, Artificial Sequence
  synthetic sequence
gatttgcaccact

SEQ ID NO: 9096 - DNA, 13 bp, Artificial Sequence
  synthetic sequence
gggtgatagttgg

SEQ ID NO: 9097 - DNA, 13 bp, Artificial Sequence
  synthetic sequence
ccatggagcaggg

SEQ ID NO: 9098 - DNA, 13 bp, Artificial Sequence
  synthetic sequence
taattgaagcttc

SEQ ID NO: 9099 - DNA, 13 bp, Artificial Sequence
  synthetic sequence
ctgctgtggctgg

SEQ ID NO: 9100 - DNA, 13 bp, Artificial Sequence
  synthetic sequence
gtgtttgaaggtg

SEQ ID NO: 9101 - DNA, 13 bp, Artificial Sequence
  synthetic sequence
tcattgattggtt

SEQ ID NO: 9102 - DNA, 13 bp, Artificial Sequence
  synthetic sequence
tctcaacagttat

SEQ ID NO: 9103 - DNA, 13 bp, Artificial Sequence
  synthetic sequence
tcaggacactctt

SEQ ID NO: 9104 - DNA, 13 bp, Artificial Sequence
  synthetic sequence
acgggagccacaa

SEQ ID NO: 9105 - DNA, 13 bp, Artificial Sequence
  synthetic sequence
aattgcatggagg

SEQ ID NO: 9106 - DNA, 13 bp, Artificial Sequence
  synthetic sequence
actagcaagggag

SEQ ID NO: 9107 - DNA, 13 bp, Artificial Sequence
  synthetic sequence
tggataagtcttc

SEQ ID NO: 9108 - DNA, 13 bp, Artificial Sequence
  synthetic sequence
aacaagaaaccca

SEQ ID NO: 9109 - DNA, 13 bp, Artificial Sequence
  synthetic sequence
gggtccaccatca

SEQ ID NO: 9110 - DNA, 13 bp, Artificial Sequence
  synthetic sequence
tttggtcaaaaca

SEQ ID NO: 9111 - DNA, 13 bp, Artificial Sequence
  synthetic sequence
atgatagtttcac

SEQ ID NO: 9112 - DNA, 13 bp, Artificial Sequence
  synthetic sequence
accagaaactatg

SEQ ID NO: 9113 - DNA, 13 bp, Artificial Sequence
  synthetic sequence
agaatacaaaagc

SEQ ID NO: 9114 - DNA, 13 bp, Artificial Sequence
  synthetic sequence
ggtagcaaccaat

SEQ ID NO: 9115 - DNA, 13 bp, Artificial Sequence
  synthetic sequence
aatcactcacatc

SEQ ID NO: 9116 - DNA, 13 bp, Artificial Sequence
  synthetic sequence
gagagttcaccat

SEQ ID NO: 9117 - DNA, 13 bp, Artificial Sequence
  synthetic sequence
atgggtttgcatc

SEQ ID NO: 9118 - DNA, 13 bp, Artificial Sequence
  synthetic sequence
gattatctcaacc

SEQ ID NO: 9119 - DNA, 13 bp, Artificial Sequence
  synthetic sequence
catacgtcatgcg

SEQ ID NO: 9120 - DNA, 13 bp, Artificial Sequence
  synthetic sequence
tgctggagaacca

SEQ ID NO: 9121 - DNA, 13 bp, Artificial Sequence
  synthetic sequence
accagtatgtctg

SEQ ID NO: 9122 - DNA, 13 bp, Artificial Sequence
  synthetic sequence
ccactatatgcac

SEQ ID NO: 9123 - DNA, 13 bp, Artificial Sequence
  synthetic sequence
gtgtttgaaggag

SEQ ID NO: 9124 - DNA, 13 bp, Artificial Sequence
  synthetic sequence
gcatggttcgagg

SEQ ID NO: 9125 - DNA, 13 bp, Artificial Sequence
  synthetic sequence
agcatggttacta

SEQ ID NO: 9126 - DNA, 13 bp, Artificial Sequence
  synthetic sequence
cccaataagagac

SEQ ID NO: 9127 - DNA, 13 bp, Artificial Sequence
  synthetic sequence
agggttagataca

SEQ ID NO: 9128 - DNA, 13 bp, Artificial Sequence
  synthetic sequence
gaagcatccagtc

SEQ ID NO: 9129 - DNA, 13 bp, Artificial Sequence
  synthetic sequence
tgaccagcatggt

SEQ ID NO: 9130 - DNA, 13 bp, Artificial Sequence
  synthetic sequence
aaatcccgtacgt

SEQ ID NO: 9131 - DNA, 13 bp, Artificial Sequence
  synthetic sequence
accacctgtacaa

SEQ ID NO: 9132 - DNA, 13 bp, Artificial Sequence
  synthetic sequence
tttgagggtgtga

SEQ ID NO: 9133 - DNA, 13 bp, Artificial Sequence
  synthetic sequence
aaagctgtgtaca

SEQ ID NO: 9134 - DNA, 13 bp, Artificial Sequence
  synthetic sequence
accaaaagtgatc

SEQ ID NO: 9135 - DNA, 13 bp, Artificial Sequence
  synthetic sequence
ccaggggattgtg

SEQ ID NO: 9136 - DNA, 13 bp, Artificial Sequence
  synthetic sequence
ccaagttcactga

SEQ ID NO: 9137 - DNA, 13 bp, Artificial Sequence
  synthetic sequence
gaagccatggaac

SEQ ID NO: 9138 - DNA, 13 bp, Artificial Sequence
  synthetic sequence
gctatggagcaag

SEQ ID NO: 9139 - DNA, 13 bp, Artificial Sequence
  synthetic sequence
ggtgaattcaaag

SEQ ID NO: 9140 - DNA, 13 bp, Artificial Sequence
  synthetic sequence
agatgtgcaagaa

SEQ ID NO: 9141 - DNA, 13 bp, Artificial Sequence
  synthetic sequence
atttccaagttca

SEQ ID NO: 9142 - DNA, 13 bp, Artificial Sequence
  synthetic sequence
gggacatcagacc

SEQ ID NO: 9143 - DNA, 13 bp, Artificial Sequence
  synthetic sequence
atccttggttttg

SEQ ID NO: 9144 - DNA, 13 bp, Artificial Sequence
  synthetic sequence
aaattccaccatt

SEQ ID NO: 9145 - DNA, 13 bp, Artificial Sequence
  synthetic sequence
tggaagagcttta

SEQ ID NO: 9146 - DNA, 13 bp, Artificial Sequence
  synthetic sequence
ccttaggtgtcaa

SEQ ID NO: 9147 - DNA, 13 bp, Artificial Sequence
  synthetic sequence
gagtagtcaatga

SEQ ID NO: 9148 - DNA, 13 bp, Artificial Sequence
  synthetic sequence
ctggaaaatcaaa

SEQ ID NO: 9149 - DNA, 13 bp, Artificial Sequence
  synthetic sequence
tgcacggcagtcc

SEQ ID NO: 9150 - DNA, 13 bp, Artificial Sequence
  synthetic sequence
gttctgtggatcc

SEQ ID NO: 9151 - DNA, 13 bp, Artificial Sequence
  synthetic sequence
ctactttcgctgc

SEQ ID NO: 9152 - DNA, 13 bp, Artificial Sequence
  synthetic sequence
atgcatttgttta

SEQ ID NO: 9153 - DNA, 13 bp, Artificial Sequence
  synthetic sequence
cgatgtgttgtga

SEQ ID NO: 9154 - DNA, 13 bp, Artificial Sequence
  synthetic sequence
tcgggatgcacgt

SEQ ID NO: 9155 - DNA, 13 bp, Artificial Sequence
  synthetic sequence
aaaaacaatacga

SEQ ID NO: 9156 - DNA, 13 bp, Artificial Sequence
  synthetic sequence
ctagtattgagtc

SEQ ID NO: 9157 - DNA, 13 bp, Artificial Sequence
  synthetic sequence
cgaccccatactc

SEQ ID NO: 9158 - DNA, 13 bp, Artificial Sequence
  synthetic sequence
tgtgggggcattt

SEQ ID NO: 9159 - DNA, 13 bp, Artificial Sequence
  synthetic sequence
aaggagacagttg

SEQ ID NO: 9160 - DNA, 13 bp, Artificial Sequence
  synthetic sequence
ccatatgtcatgc

SEQ ID NO: 9161 - DNA, 13 bp, Artificial Sequence
  synthetic sequence
atgatagcttcac

SEQ ID NO: 9162 - DNA, 13 bp, Artificial Sequence
  synthetic sequence
tggacgccaaagc

SEQ ID NO: 9163 - DNA, 13 bp, Artificial Sequence
  synthetic sequence
tgcagctgagaag

SEQ ID NO: 9164 - DNA, 13 bp, Artificial Sequence
  synthetic sequence
aaatgtgcaaaaa

SEQ ID NO: 9165 - DNA, 13 bp, Artificial Sequence
  synthetic sequence
atgactatcctgc

SEQ ID NO: 9166 - DNA, 13 bp, Artificial Sequence
  synthetic sequence
cagatatcagaga

SEQ ID NO: 9167 - DNA, 13 bp, Artificial Sequence
  synthetic sequence
tccaccgtggaat

SEQ ID NO: 9168 - DNA, 13 bp, Artificial Sequence
  synthetic sequence
accaggaattatg

SEQ ID NO: 9169 - DNA, 13 bp, Artificial Sequence
  synthetic sequence
atatctatagtgt

SEQ ID NO: 9170 - DNA, 13 bp, Artificial Sequence
  synthetic sequence
aattcacaatgct

SEQ ID NO: 9171 - DNA, 13 bp, Artificial Sequence
  synthetic sequence
gtaactgagcagg

SEQ ID NO: 9172 - DNA, 13 bp, Artificial Sequence
  synthetic sequence
acagttgcacaca

SEQ ID NO: 9173 - DNA, 13 bp, Artificial Sequence
  synthetic sequence
gtaatgcgtttgt

SEQ ID NO: 9174 - DNA, 13 bp, Artificial Sequence
  synthetic sequence
cgatcctgtgtct

SEQ ID NO: 9175 - DNA, 13 bp, Artificial Sequence
  synthetic sequence
agcccgatgtagc

SEQ ID NO: 9176 - DNA, 13 bp, Artificial Sequence
  synthetic sequence
tagagaatcagat

SEQ ID NO: 9177 - DNA, 13 bp, Artificial Sequence
  synthetic sequence
gttttcggtttgg

SEQ ID NO: 9178 - DNA, 13 bp, Artificial Sequence
  synthetic sequence
cacacggacgatc

SEQ ID NO: 9179 - DNA, 13 bp, Artificial Sequence
  synthetic sequence
cactaccaccaga

SEQ ID NO: 9180 - DNA, 13 bp, Artificial Sequence
  synthetic sequence
gacgccaaagccc

SEQ ID NO: 9181 - DNA, 13 bp, Artificial Sequence
  synthetic sequence
gaagcagtggatc

SEQ ID NO: 9182 - DNA, 13 bp, Artificial Sequence
  synthetic sequence
gagcaatgacaat

SEQ ID NO: 9183 - DNA, 13 bp, Artificial Sequence
  synthetic sequence
gaatcaccccacc

SEQ ID NO: 9184 - DNA, 13 bp, Artificial Sequence
  synthetic sequence
ctgatggacaaat

SEQ ID NO: 9185 - DNA, 13 bp, Artificial Sequence
  synthetic sequence
acccatcaatttt

SEQ ID NO: 9186 - DNA, 13 bp, Artificial Sequence
  synthetic sequence
aaagttgagcaag

SEQ ID NO: 9187 - DNA, 13 bp, Artificial Sequence
  synthetic sequence
cccactttccagt

SEQ ID NO: 9188 - DNA, 13 bp, Artificial Sequence
  synthetic sequence
tgattacacaggc

SEQ ID NO: 9189 - DNA, 13 bp, Artificial Sequence
  synthetic sequence
ttagaactgccaa

SEQ ID NO: 9190 - DNA, 13 bp, Artificial Sequence
  synthetic sequence
catcaaggatgtg

SEQ ID NO: 9191 - DNA, 13 bp, Artificial Sequence
  synthetic sequence
atgtgatatggga

SEQ ID NO: 9192 - DNA, 13 bp, Artificial Sequence
  synthetic sequence
atatccaagttca

SEQ ID NO: 9193 - DNA, 13 bp, Artificial Sequence
  synthetic sequence
ggactcccaaaca

SEQ ID NO: 9194 - DNA, 13 bp, Artificial Sequence
  synthetic sequence
aaaatcaaattgc

SEQ ID NO: 9195 - DNA, 13 bp, Artificial Sequence
  synthetic sequence
acaggaaaatcag

SEQ ID NO: 9196 - DNA, 13 bp, Artificial Sequence
  synthetic sequence
tcaccagaaacta

SEQ ID NO: 9197 - DNA, 13 bp, Artificial Sequence
  synthetic sequence
cggtggacgacaa

SEQ ID NO: 9198 - DNA, 13 bp, Artificial Sequence
  synthetic sequence
accattcacacca

SEQ ID NO: 9199 - DNA, 13 bp, Artificial Sequence
  synthetic sequence
tttcagtacatgg

SEQ ID NO: 9200 - DNA, 13 bp, Artificial Sequence
  synthetic sequence
gatcaccaaaaat

SEQ ID NO: 9201 - DNA, 13 bp, Artificial Sequence
  synthetic sequence
tggacgcaaaagc

SEQ ID NO: 9202 - DNA, 13 bp, Artificial Sequence
  synthetic sequence
agtaatcagtacc

SEQ ID NO: 9203 - DNA, 13 bp, Artificial Sequence
  synthetic sequence
tcctagaaacact

SEQ ID NO: 9204 - DNA, 13 bp, Artificial Sequence
  synthetic sequence
gatcggagacaaa

SEQ ID NO: 9205 - DNA, 13 bp, Artificial Sequence
  synthetic sequence
aggccattcagct

SEQ ID NO: 9206 - DNA, 13 bp, Artificial Sequence
  synthetic sequence
caactacatcgat

SEQ ID NO: 9207 - DNA, 13 bp, Artificial Sequence
  synthetic sequence
tcaccatgttggg

SEQ ID NO: 9208 - DNA, 13 bp, Artificial Sequence
  synthetic sequence
tgttggagaatca

SEQ ID NO: 9209 - DNA, 13 bp, Artificial Sequence
  synthetic sequence
gcagttgaggcaa

SEQ ID NO: 9210 - DNA, 13 bp, Artificial Sequence
  synthetic sequence
cgaatcattcttt

SEQ ID NO: 9211 - DNA, 13 bp, Artificial Sequence
  synthetic sequence
ctacggccctgga

SEQ ID NO: 9212 - DNA, 13 bp, Artificial Sequence
  synthetic sequence
tcactcacaccat

SEQ ID NO: 9213 - DNA, 13 bp, Artificial Sequence
  synthetic sequence
gccatgtacggta

SEQ ID NO: 9214 - DNA, 13 bp, Artificial Sequence
  synthetic sequence
cacagtagaattc

SEQ ID NO: 9215 - DNA, 13 bp, Artificial Sequence
  synthetic sequence
tgtatggtactga

SEQ ID NO: 9216 - DNA, 13 bp, Artificial Sequence
  synthetic sequence
cacaccgatcttg

SEQ ID NO: 9217 - DNA, 13 bp, Artificial Sequence
  synthetic sequence
attagtgttaccc

SEQ ID NO: 9218 - DNA, 13 bp, Artificial Sequence
  synthetic sequence
aaatcaccgaaac

SEQ ID NO: 9219 - DNA, 13 bp, Artificial Sequence
  synthetic sequence
cagttgactccca

SEQ ID NO: 9220 - DNA, 13 bp, Artificial Sequence
  synthetic sequence
ctaaccagtatgg

SEQ ID NO: 9221 - DNA, 13 bp, Artificial Sequence
  synthetic sequence
gagcttctttgcg

SEQ ID NO: 9222 - DNA, 13 bp, Artificial Sequence
  synthetic sequence
ctcagggcacaga

SEQ ID NO: 9223 - DNA, 13 bp, Artificial Sequence
  synthetic sequence
ctcggttagtcaa

SEQ ID NO: 9224 - DNA, 13 bp, Artificial Sequence
  synthetic sequence
ctcacgcggttga

SEQ ID NO: 9225 - DNA, 13 bp, Artificial Sequence
  synthetic sequence
ttgggagtggagt

SEQ ID NO: 9226 - DNA, 13 bp, Artificial Sequence
  synthetic sequence
tcactccacccac

SEQ ID NO: 9227 - DNA, 13 bp, Artificial Sequence
  synthetic sequence
tacgcggtagaag

SEQ ID NO: 9228 - DNA, 13 bp, Artificial Sequence
  synthetic sequence
caatccagtggac

SEQ ID NO: 9229 - DNA, 13 bp, Artificial Sequence
  synthetic sequence
agaatccaaaagt

SEQ ID NO: 9230 - DNA, 13 bp, Artificial Sequence
  synthetic sequence
ctctctcaataga

SEQ ID NO: 9231 - DNA, 13 bp, Artificial Sequence
  synthetic sequence
cggacaattacca

SEQ ID NO: 9232 - DNA, 13 bp, Artificial Sequence
  synthetic sequence
ttttatgatggtt

SEQ ID NO: 9233 - DNA, 13 bp, Artificial Sequence
  synthetic sequence
ccagcctggttcg

SEQ ID NO: 9234 - DNA, 13 bp, Artificial Sequence
  synthetic sequence
gagatcttagatg

SEQ ID NO: 9235 - DNA, 13 bp, Artificial Sequence
  synthetic sequence
gacaattgtacca

SEQ ID NO: 9236 - DNA, 13 bp, Artificial Sequence
  synthetic sequence
ctggaaaataact

SEQ ID NO: 9237 - DNA, 13 bp, Artificial Sequence
  synthetic sequence
tttcaatatatgg

SEQ ID NO: 9238 - DNA, 13 bp, Artificial Sequence
  synthetic sequence
caatgactattct

SEQ ID NO: 9239 - DNA, 13 bp, Artificial Sequence
  synthetic sequence
agccagcagtcct

SEQ ID NO: 9240 - DNA, 13 bp, Artificial Sequence
  synthetic sequence
aaacagagcttat

SEQ ID NO: 9241 - DNA, 13 bp, Artificial Sequence
  synthetic sequence
gttgaacagggaa

SEQ ID NO: 9242 - DNA, 13 bp, Artificial Sequence
  synthetic sequence
tggccaaaacatg

SEQ ID NO: 9243 - DNA, 13 bp, Artificial Sequence
  synthetic sequence
gattggagacaag

SEQ ID NO: 9244 - DNA, 13 bp, Artificial Sequence
  synthetic sequence
ggtttgctcctct

SEQ ID NO: 9245 - DNA, 13 bp, Artificial Sequence
  synthetic sequence
acacaaaagaaat

SEQ ID NO: 9246 - DNA, 13 bp, Artificial Sequence
  synthetic sequence
gaaaaccagatat

SEQ ID NO: 9247 - DNA, 13 bp, Artificial Sequence
  synthetic sequence
gcacgttcactcc

SEQ ID NO: 9248 - DNA, 13 bp, Artificial Sequence
  synthetic sequence
cgtgcactgggaa

SEQ ID NO: 9249 - DNA, 13 bp, Artificial Sequence
  synthetic sequence
ttaaagacgtcct

SEQ ID NO: 9250 - DNA, 13 bp, Artificial Sequence
  synthetic sequence
aatcaccgagacg

SEQ ID NO: 9251 - DNA, 13 bp, Artificial Sequence
  synthetic sequence
caaataaacgacc

SEQ ID NO: 9252 - DNA, 13 bp, Artificial Sequence
  synthetic sequence
gtatttgaagggg

SEQ ID NO: 9253 - DNA, 13 bp, Artificial Sequence
  synthetic sequence
tagcatagagtct

SEQ ID NO: 9254 - DNA, 13 bp, Artificial Sequence
  synthetic sequence
actagaaattacg

SEQ ID NO: 9255 - DNA, 13 bp, Artificial Sequence
  synthetic sequence
gtgtgccaatcgg

SEQ ID NO: 9256 - DNA, 13 bp, Artificial Sequence
  synthetic sequence
ggaggctatggaa

SEQ ID NO: 9257 - DNA, 13 bp, Artificial Sequence
  synthetic sequence
tgtggaattcatt

SEQ ID NO: 9258 - DNA, 13 bp, Artificial Sequence
  synthetic sequence
ttccagtacatgg

SEQ ID NO: 9259 - DNA, 13 bp, Artificial Sequence
  synthetic sequence
aggaagtggaggt

SEQ ID NO: 9260 - DNA, 13 bp, Artificial Sequence
  synthetic sequence
ccaaggagatgca

SEQ ID NO: 9261 - DNA, 13 bp, Artificial Sequence
  synthetic sequence
actaggaactatg

SEQ ID NO: 9262 - DNA, 13 bp, Artificial Sequence
  synthetic sequence
aaggaaccagccg

SEQ ID NO: 9263 - DNA, 13 bp, Artificial Sequence
  synthetic sequence
tgtcatgcgtcaa

SEQ ID NO: 9264 - DNA, 13 bp, Artificial Sequence
  synthetic sequence
tgacgcatctctc

SEQ ID NO: 9265 - DNA, 13 bp, Artificial Sequence
  synthetic sequence
tcttactgaaaac

SEQ ID NO: 9266 - DNA, 13 bp, Artificial Sequence
  synthetic sequence
ttacctcaaacta

SEQ ID NO: 9267 - DNA, 13 bp, Artificial Sequence
  synthetic sequence
ttccatactacgg

SEQ ID NO: 9268 - DNA, 13 bp, Artificial Sequence
  synthetic sequence
agtatctaactgc

SEQ ID NO: 9269 - DNA, 13 bp, Artificial Sequence
  synthetic sequence
tggatgctaaagc

SEQ ID NO: 9270 - DNA, 13 bp, Artificial Sequence
  synthetic sequence
tttcaatacatgg

SEQ ID NO: 9271 - DNA, 13 bp, Artificial Sequence
  synthetic sequence
agaaccagattgc

SEQ ID NO: 9272 - DNA, 13 bp, Artificial Sequence
  synthetic sequence
ggctatgaccatt

SEQ ID NO: 9273 - DNA, 13 bp, Artificial Sequence
  synthetic sequence
gtggaaacagggg

SEQ ID NO: 9274 - DNA, 13 bp, Artificial Sequence
  synthetic sequence
tcgccccactcta

SEQ ID NO: 9275 - DNA, 13 bp, Artificial Sequence
  synthetic sequence
aagaatcgcaaag

SEQ ID NO: 9276 - DNA, 13 bp, Artificial Sequence
  synthetic sequence
ttttggagatccc

SEQ ID NO: 9277 - DNA, 13 bp, Artificial Sequence
  synthetic sequence
agaactgctaaag

SEQ ID NO: 9278 - DNA, 13 bp, Artificial Sequence
  synthetic sequence
ctatcagaactgc

SEQ ID NO: 9279 - DNA, 13 bp, Artificial Sequence
  synthetic sequence
ccatgcttggagt

SEQ ID NO: 9280 - DNA, 13 bp, Artificial Sequence
  synthetic sequence
ttctagtgagata

SEQ ID NO: 9281 - DNA, 13 bp, Artificial Sequence
  synthetic sequence
ctgagtacaattt

SEQ ID NO: 9282 - DNA, 13 bp, Artificial Sequence
  synthetic sequence
tgcaagcagtaac

SEQ ID NO: 9283 - DNA, 13 bp, Artificial Sequence
  synthetic sequence
tggtttgaagctc

SEQ ID NO: 9284 - DNA, 13 bp, Artificial Sequence
  synthetic sequence
cttagatgccaac

SEQ ID NO: 9285 - DNA, 13 bp, Artificial Sequence
  synthetic sequence
cgtaccggcaaac

SEQ ID NO: 9286 - DNA, 13 bp, Artificial Sequence
  synthetic sequence
tctaagtttatag

SEQ ID NO: 9287 - DNA, 13 bp, Artificial Sequence
  synthetic sequence
tggaaaaccagat

SEQ ID NO: 9288 - DNA, 13 bp, Artificial Sequence
  synthetic sequence
gaaaggccatcca

SEQ ID NO: 9289 - DNA, 13 bp, Artificial Sequence
  synthetic sequence
ccagcatggtaac

SEQ ID NO: 9290 - DNA, 13 bp, Artificial Sequence
  synthetic sequence
gagatgtgtaaaa

SEQ ID NO: 9291 - DNA, 13 bp, Artificial Sequence
  synthetic sequence
ttggcgtccatga

SEQ ID NO: 9292 - DNA, 13 bp, Artificial Sequence
  synthetic sequence
gaaaaatttaccc

SEQ ID NO: 9293 - DNA, 13 bp, Artificial Sequence
  synthetic sequence
aaacacggacacc

SEQ ID NO: 9294 - DNA, 13 bp, Artificial Sequence
  synthetic sequence
ggattagccgcat

SEQ ID NO: 9295 - DNA, 13 bp, Artificial Sequence
  synthetic sequence
tgctccgggtggt

SEQ ID NO: 9296 - DNA, 13 bp, Artificial Sequence
  synthetic sequence
ctcttgaactgta

SEQ ID NO: 9297 - DNA, 13 bp, Artificial Sequence
  synthetic sequence
gaagtgcttgttc

SEQ ID NO: 9298 - DNA, 13 bp, Artificial Sequence
  synthetic sequence
gctgagcgcaacg

SEQ ID NO: 9299 - DNA, 13 bp, Artificial Sequence
  synthetic sequence
gtagggttactaa

SEQ ID NO: 9300 - DNA, 13 bp, Artificial Sequence
  synthetic sequence
gttagtccatagt

SEQ ID NO: 9301 - DNA, 13 bp, Artificial Sequence
  synthetic sequence
ctagtgttcacga

SEQ ID NO: 9302 - DNA, 13 bp, Artificial Sequence
  synthetic sequence
catcaccataggc

SEQ ID NO: 9303 - DNA, 13 bp, Artificial Sequence
  synthetic sequence
gtgtagtaattta

SEQ ID NO: 9304 - DNA, 13 bp, Artificial Sequence
  synthetic sequence
tctgagtgaagta

SEQ ID NO: 9305 - DNA, 13 bp, Artificial Sequence
  synthetic sequence
agtttgctggttg

SEQ ID NO: 9306 - DNA, 13 bp, Artificial Sequence
  synthetic sequence
tctgtgatgaaac

SEQ ID NO: 9307 - DNA, 13 bp, Artificial Sequence
  synthetic sequence
ggaaagttgtaca

SEQ ID NO: 9308 - DNA, 13 bp, Artificial Sequence
  synthetic sequence
tcattggcattac

SEQ ID NO: 9309 - DNA, 13 bp, Artificial Sequence
  synthetic sequence
tagcacagttgtt

SEQ ID NO: 9310 - DNA, 13 bp, Artificial Sequence
  synthetic sequence
gatcttctgtttc

SEQ ID NO: 9311 - DNA, 13 bp, Artificial Sequence
  synthetic sequence
tgcaccttgcgat

SEQ ID NO: 9312 - DNA, 13 bp, Artificial Sequence
  synthetic sequence
gtgaatttcttca

SEQ ID NO: 9313 - DNA, 13 bp, Artificial Sequence
  synthetic sequence
aaattgaagtgcc

SEQ ID NO: 9314 - DNA, 13 bp, Artificial Sequence
  synthetic sequence
ttctttcccattg

SEQ ID NO: 9315 - DNA, 13 bp, Artificial Sequence
  synthetic sequence
tggaggtgttctc

SEQ ID NO: 9316 - DNA, 13 bp, Artificial Sequence
  synthetic sequence
tttcttttagcca

SEQ ID NO: 9317 - DNA, 13 bp, Artificial Sequence
  synthetic sequence
ctgtttgaacctg

SEQ ID NO: 9318 - DNA, 13 bp, Artificial Sequence
  synthetic sequence
attcttcttcgcc

SEQ ID NO: 9319 - DNA, 13 bp, Artificial Sequence
  synthetic sequence
ccatgtcaaatct

SEQ ID NO: 9320 - DNA, 13 bp, Artificial Sequence
  synthetic sequence
acattgttgaata

SEQ ID NO: 9321 - DNA, 13 bp, Artificial Sequence
  synthetic sequence
aaaatgcaaccaa

SEQ ID NO: 9322 - DNA, 13 bp, Artificial Sequence
  synthetic sequence
catcaaactcagg

SEQ ID NO: 9323 - DNA, 13 bp, Artificial Sequence
  synthetic sequence
tcttcttgtgtag

SEQ ID NO: 9324 - DNA, 13 bp, Artificial Sequence
  synthetic sequence
tgagcccatcttt

SEQ ID NO: 9325 - DNA, 13 bp, Artificial Sequence
  synthetic sequence
acatgtccattgt

SEQ ID NO: 9326 - DNA, 13 bp, Artificial Sequence
  synthetic sequence
accaccaccctct

SEQ ID NO: 9327 - DNA, 13 bp, Artificial Sequence
  synthetic sequence
cattgtccacctc

SEQ ID NO: 9328 - DNA, 13 bp, Artificial Sequence
  synthetic sequence
tgaatccactacc

SEQ ID NO: 9329 - DNA, 13 bp, Artificial Sequence
  synthetic sequence
aatgccattctca

SEQ ID NO: 9330 - DNA, 13 bp, Artificial Sequence
  synthetic sequence
ttctgggtgtgga

SEQ ID NO: 9331 - DNA, 13 bp, Artificial Sequence
  synthetic sequence
ttccttgtggcat

SEQ ID NO: 9332 - DNA, 13 bp, Artificial Sequence
  synthetic sequence
tcatgtacactct

SEQ ID NO: 9333 - DNA, 13 bp, Artificial Sequence
  synthetic sequence
ggtaatattcatt

SEQ ID NO: 9334 - DNA, 13 bp, Artificial Sequence
  synthetic sequence
cagccctcccaag

SEQ ID NO: 9335 - DNA, 13 bp, Artificial Sequence
  synthetic sequence
tgctttcaccagg

SEQ ID NO: 9336 - DNA, 13 bp, Artificial Sequence
  synthetic sequence
ctgatattcttgc

SEQ ID NO: 9337 - DNA, 13 bp, Artificial Sequence
  synthetic sequence
ccaaggtaccacc

SEQ ID NO: 9338 - DNA, 13 bp, Artificial Sequence
  synthetic sequence
acatgtgagttgt

SEQ ID NO: 9339 - DNA, 13 bp, Artificial Sequence
  synthetic sequence
ctataaccacacg

SEQ ID NO: 9340 - DNA, 13 bp, Artificial Sequence
  synthetic sequence
attcaggccatct

SEQ ID NO: 9341 - DNA, 13 bp, Artificial Sequence
  synthetic sequence
acagtgatgttgc

SEQ ID NO: 9342 - DNA, 13 bp, Artificial Sequence
  synthetic sequence
gtggaagattcag

SEQ ID NO: 9343 - DNA, 13 bp, Artificial Sequence
  synthetic sequence
cactgccacggtg

SEQ ID NO: 9344 - DNA, 13 bp, Artificial Sequence
  synthetic sequence
cacatttgttctg

SEQ ID NO: 9345 - DNA, 13 bp, Artificial Sequence
  synthetic sequence
gtttgcacggtgt

SEQ ID NO: 9346 - DNA, 13 bp, Artificial Sequence
  synthetic sequence
aggtcatccataa

SEQ ID NO: 9347 - DNA, 13 bp, Artificial Sequence
  synthetic sequence
agcaacttctctg

SEQ ID NO: 9348 - DNA, 13 bp, Artificial Sequence
  synthetic sequence
gcttctcttccat

SEQ ID NO: 9349 - DNA, 13 bp, Artificial Sequence
  synthetic sequence
ggtaatcaactgg

SEQ ID NO: 9350 - DNA, 13 bp, Artificial Sequence
  synthetic sequence
ccgtacaacgaat

SEQ ID NO: 9351 - DNA, 13 bp, Artificial Sequence
  synthetic sequence
ttggttttggacg

SEQ ID NO: 9352 - DNA, 13 bp, Artificial Sequence
  synthetic sequence
actctaatttgtc

SEQ ID NO: 9353 - DNA, 13 bp, Artificial Sequence
  synthetic sequence
cagtggttccaac

SEQ ID NO: 9354 - DNA, 13 bp, Artificial Sequence
  synthetic sequence
atgcctttctctt

SEQ ID NO: 9355 - DNA, 13 bp, Artificial Sequence
  synthetic sequence
atccgattttctc

SEQ ID NO: 9356 - DNA, 13 bp, Artificial Sequence
  synthetic sequence
ttgtacataacgt

SEQ ID NO: 9357 - DNA, 13 bp, Artificial Sequence
  synthetic sequence
cgctcatgacttg

SEQ ID NO: 9358 - DNA, 13 bp, Artificial Sequence
  synthetic sequence
acataatttggta

SEQ ID NO: 9359 - DNA, 13 bp, Artificial Sequence
  synthetic sequence
catacttagagaa

SEQ ID NO: 9360 - DNA, 13 bp, Artificial Sequence
  synthetic sequence
tacatttccatgg

SEQ ID NO: 9361 - DNA, 13 bp, Artificial Sequence
  synthetic sequence
cgttgatacactc

SEQ ID NO: 9362 - DNA, 13 bp, Artificial Sequence
  synthetic sequence
tgatagctggtgt

SEQ ID NO: 9363 - DNA, 13 bp, Artificial Sequence
  synthetic sequence
catgtctggtttg

SEQ ID NO: 9364 - DNA, 13 bp, Artificial Sequence
  synthetic sequence
accaccaccctcg

SEQ ID NO: 9365 - DNA, 13 bp, Artificial Sequence
  synthetic sequence
tcaggccaacgcc

SEQ ID NO: 9366 - DNA, 13 bp, Artificial Sequence
  synthetic sequence
tgaatgtccatgt

SEQ ID NO: 9367 - DNA, 13 bp, Artificial Sequence
  synthetic sequence
tacccggacctac

SEQ ID NO: 9368 - DNA, 13 bp, Artificial Sequence
  synthetic sequence
cactggcttcagt

SEQ ID NO: 9369 - DNA, 13 bp, Artificial Sequence
  synthetic sequence
cgggtatgtcaat

SEQ ID NO: 9370 - DNA, 13 bp, Artificial Sequence
  synthetic sequence
gtttggtagaaga

SEQ ID NO: 9371 - DNA, 13 bp, Artificial Sequence
  synthetic sequence
ttttagatacact

SEQ ID NO: 9372 - DNA, 13 bp, Artificial Sequence
  synthetic sequence
ggaggcgcgtatg

SEQ ID NO: 9373 - DNA, 13 bp, Artificial Sequence
  synthetic sequence
agggagtcaccta

SEQ ID NO: 9374 - DNA, 13 bp, Artificial Sequence
  synthetic sequence
aagccattctcat

SEQ ID NO: 9375 - DNA, 13 bp, Artificial Sequence
  synthetic sequence
tatacccgcaagc

SEQ ID NO: 9376 - DNA, 13 bp, Artificial Sequence
  synthetic sequence
tcttgagagaagt

SEQ ID NO: 9377 - DNA, 13 bp, Artificial Sequence
  synthetic sequence
ggcactaccatag

SEQ ID NO: 9378 - DNA, 13 bp, Artificial Sequence
  synthetic sequence
gtggagaggggtg

SEQ ID NO: 9379 - DNA, 13 bp, Artificial Sequence
  synthetic sequence
cctaacccctgtg

SEQ ID NO: 9380 - DNA, 13 bp, Artificial Sequence
  synthetic sequence
gtgatgtctggtt

SEQ ID NO: 9381 - DNA, 13 bp, Artificial Sequence
  synthetic sequence
tcactagcaaaat

SEQ ID NO: 9382 - DNA, 13 bp, Artificial Sequence
  synthetic sequence
tttcatttctctt

SEQ ID NO: 9383 - DNA, 13 bp, Artificial Sequence
  synthetic sequence
taagttcatcctt

SEQ ID NO: 9384 - DNA, 13 bp, Artificial Sequence
  synthetic sequence
taaacacactcaa

SEQ ID NO: 9385 - DNA, 13 bp, Artificial Sequence
  synthetic sequence
cgttttgcaaatc

SEQ ID NO: 9386 - DNA, 13 bp, Artificial Sequence
  synthetic sequence
atgtcaatcttca

SEQ ID NO: 9387 - DNA, 13 bp, Artificial Sequence
  synthetic sequence
ggtacctagctgg

SEQ ID NO: 9388 - DNA, 13 bp, Artificial Sequence
  synthetic sequence
ccagatggcatgc

SEQ ID NO: 9389 - DNA, 13 bp, Artificial Sequence
  synthetic sequence
agttatccacggt

SEQ ID NO: 9390 - DNA, 13 bp, Artificial Sequence
  synthetic sequence
gaataggtgaaga

SEQ ID NO: 9391 - DNA, 13 bp, Artificial Sequence
  synthetic sequence
agcttttcttcca

SEQ ID NO: 9392 - DNA, 13 bp, Artificial Sequence
  synthetic sequence
cctggtgtccagc

SEQ ID NO: 9393 - DNA, 13 bp, Artificial Sequence
  synthetic sequence
tctccaccagcag

SEQ ID NO: 9394 - DNA, 13 bp, Artificial Sequence
  synthetic sequence
cttagttcatctt

SEQ ID NO: 9395 - DNA, 13 bp, Artificial Sequence
  synthetic sequence
acgtacttggaga

SEQ ID NO: 9396 - DNA, 13 bp, Artificial Sequence
  synthetic sequence
aatccaattttct

SEQ ID NO: 9397 - DNA, 13 bp, Artificial Sequence
  synthetic sequence
tctcgttcctctt

SEQ ID NO: 9398 - DNA, 13 bp, Artificial Sequence
  synthetic sequence
gcaccatctgggt

SEQ ID NO: 9399 - DNA, 13 bp, Artificial Sequence
  synthetic sequence
gctctagcaatca

SEQ ID NO: 9400 - DNA, 13 bp, Artificial Sequence
  synthetic sequence
tgatcttgatcaa

SEQ ID NO: 9401 - DNA, 13 bp, Artificial Sequence
  synthetic sequence
tctcatttctctt

SEQ ID NO: 9402 - DNA, 13 bp, Artificial Sequence
  synthetic sequence
aatttcctggtgt

SEQ ID NO: 9403 - DNA, 13 bp, Artificial Sequence
  synthetic sequence
tttgaagtaaaca

SEQ ID NO: 9404 - DNA, 13 bp, Artificial Sequence
  synthetic sequence
tgaatttctttca

SEQ ID NO: 9405 - DNA, 13 bp, Artificial Sequence
  synthetic sequence
acttggaaaagat

SEQ ID NO: 9406 - DNA, 13 bp, Artificial Sequence
  synthetic sequence
gccactgccatgg

SEQ ID NO: 9407 - DNA, 13 bp, Artificial Sequence
  synthetic sequence
ccaattttctcta

SEQ ID NO: 9408 - DNA, 13 bp, Artificial Sequence
  synthetic sequence
gccccaagtgact

SEQ ID NO: 9409 - DNA, 13 bp, Artificial Sequence
  synthetic sequence
tttctcttagcca

SEQ ID NO: 9410 - DNA, 13 bp, Artificial Sequence
  synthetic sequence
tcacgtaagggag

SEQ ID NO: 9411 - DNA, 13 bp, Artificial Sequence
  synthetic sequence
ccaactgtttgag

SEQ ID NO: 9412 - DNA, 13 bp, Artificial Sequence
  synthetic sequence
tgcctttttcttc

SEQ ID NO: 9413 - DNA, 13 bp, Artificial Sequence
  synthetic sequence
tggaatgcactag

SEQ ID NO: 9414 - DNA, 13 bp, Artificial Sequence
  synthetic sequence
gcatgggttggca

SEQ ID NO: 9415 - DNA, 13 bp, Artificial Sequence
  synthetic sequence
acaaattccaact

SEQ ID NO: 9416 - DNA, 13 bp, Artificial Sequence
  synthetic sequence
ttctttttcaacc

SEQ ID NO: 9417 - DNA, 13 bp, Artificial Sequence
  synthetic sequence
tatctctcttctt

SEQ ID NO: 9418 - DNA, 13 bp, Artificial Sequence
  synthetic sequence
cgtcaccataggc

SEQ ID NO: 9419 - DNA, 13 bp, Artificial Sequence
  synthetic sequence
agtggaaagcact

SEQ ID NO: 9420 - DNA, 13 bp, Artificial Sequence
  synthetic sequence
gttaatgtttctc

SEQ ID NO: 9421 - DNA, 13 bp, Artificial Sequence
  synthetic sequence
ttggggtacttac

SEQ ID NO: 9422 - DNA, 13 bp, Artificial Sequence
  synthetic sequence
cccttagctgcgt

SEQ ID NO: 9423 - DNA, 13 bp, Artificial Sequence
  synthetic sequence
ggtaggttgattc

SEQ ID NO: 9424 - DNA, 13 bp, Artificial Sequence
  synthetic sequence
acatgagctggcc

SEQ ID NO: 9425 - DNA, 13 bp, Artificial Sequence
  synthetic sequence
tcacagtagtaca

SEQ ID NO: 9426 - DNA, 13 bp, Artificial Sequence
  synthetic sequence
gcattgcttgcag

SEQ ID NO: 9427 - DNA, 13 bp, Artificial Sequence
  synthetic sequence
ttgctccaaaaca

SEQ ID NO: 9428 - DNA, 13 bp, Artificial Sequence
  synthetic sequence
agacacatttgct

SEQ ID NO: 9429 - DNA, 13 bp, Artificial Sequence
  synthetic sequence
gtgaacccactac

SEQ ID NO: 9430 - DNA, 13 bp, Artificial Sequence
  synthetic sequence
gttggtaaaatgg

SEQ ID NO: 9431 - DNA, 13 bp, Artificial Sequence
  synthetic sequence
tgaagtatgatcg

SEQ ID NO: 9432 - DNA, 13 bp, Artificial Sequence
  synthetic sequence
tcatttcttttga

SEQ ID NO: 9433 - DNA, 13 bp, Artificial Sequence
  synthetic sequence
tgtacatcacata

SEQ ID NO: 9434 - DNA, 13 bp, Artificial Sequence
  synthetic sequence
gcatcactggatg

SEQ ID NO: 9435 - DNA, 13 bp, Artificial Sequence
  synthetic sequence
tcatcctttacat

SEQ ID NO: 9436 - DNA, 13 bp, Artificial Sequence
  synthetic sequence
tttcttttggcca

SEQ ID NO: 9437 - DNA, 13 bp, Artificial Sequence
  synthetic sequence
tcatggtggtgat

SEQ ID NO: 9438 - DNA, 13 bp, Artificial Sequence
  synthetic sequence
atccaacaaacaa

SEQ ID NO: 9439 - DNA, 13 bp, Artificial Sequence
  synthetic sequence
attcgatgtagtt

SEQ ID NO: 9440 - DNA, 13 bp, Artificial Sequence
  synthetic sequence
tagtacacccctg

SEQ ID NO: 9441 - DNA, 13 bp, Artificial Sequence
  synthetic sequence
ccattgtgccaag

SEQ ID NO: 9442 - DNA, 13 bp, Artificial Sequence
  synthetic sequence
tccatgtcaaacc

SEQ ID NO: 9443 - DNA, 13 bp, Artificial Sequence
  synthetic sequence
gccaacggcggta

SEQ ID NO: 9444 - DNA, 13 bp, Artificial Sequence
  synthetic sequence
tgggaagttgtac

SEQ ID NO: 9445 - DNA, 13 bp, Artificial Sequence
  synthetic sequence
ggatgtccatgtc

SEQ ID NO: 9446 - DNA, 13 bp, Artificial Sequence
  synthetic sequence
tgagcacccatta

SEQ ID NO: 9447 - DNA, 13 bp, Artificial Sequence
  synthetic sequence
cacgttgttgaat

SEQ ID NO: 9448 - DNA, 13 bp, Artificial Sequence
  synthetic sequence
aatttgctggttg

SEQ ID NO: 9449 - DNA, 13 bp, Artificial Sequence
  synthetic sequence
tcatgtcagctcc

SEQ ID NO: 9450 - DNA, 13 bp, Artificial Sequence
  synthetic sequence
acatacttggaga

SEQ ID NO: 9451 - DNA, 13 bp, Artificial Sequence
  synthetic sequence
ccactgggcagaa

SEQ ID NO: 9452 - DNA, 13 bp, Artificial Sequence
  synthetic sequence
tttctctcattaa

SEQ ID NO: 9453 - DNA, 13 bp, Artificial Sequence
  synthetic sequence
acataagtgacta

SEQ ID NO: 9454 - DNA, 13 bp, Artificial Sequence
  synthetic sequence
tccatgataacca

SEQ ID NO: 9455 - DNA, 13 bp, Artificial Sequence
  synthetic sequence
accggggaaacag

SEQ ID NO: 9456 - DNA, 13 bp, Artificial Sequence
  synthetic sequence
atttgtcagctgg

SEQ ID NO: 9457 - DNA, 13 bp, Artificial Sequence
  synthetic sequence
tccctggcttgtg

SEQ ID NO: 9458 - DNA, 13 bp, Artificial Sequence
  synthetic sequence
gcataatcaaatc

SEQ ID NO: 9459 - DNA, 13 bp, Artificial Sequence
  synthetic sequence
ctgtaaacttctt

SEQ ID NO: 9460 - DNA, 13 bp, Artificial Sequence
  synthetic sequence
gtgaacaaaatgc

SEQ ID NO: 9461 - DNA, 13 bp, Artificial Sequence
  synthetic sequence
actttccggtggc

SEQ ID NO: 9462 - DNA, 13 bp, Artificial Sequence
  synthetic sequence
ttgtacataacat

SEQ ID NO: 9463 - DNA, 13 bp, Artificial Sequence
  synthetic sequence
atggtgatttcca

SEQ ID NO: 9464 - DNA, 13 bp, Artificial Sequence
  synthetic sequence
tgtctctcttttt

SEQ ID NO: 9465 - DNA, 13 bp, Artificial Sequence
  synthetic sequence
gtgtaataattca

SEQ ID NO: 9466 - DNA, 13 bp, Artificial Sequence
  synthetic sequence
gtattgctaatcc

SEQ ID NO: 9467 - DNA, 13 bp, Artificial Sequence
  synthetic sequence
gccatcctcattg

SEQ ID NO: 9468 - DNA, 13 bp, Artificial Sequence
  synthetic sequence
agccattgccatg

SEQ ID NO: 9469 - DNA, 13 bp, Artificial Sequence
  synthetic sequence
actatggtctctc

SEQ ID NO: 9470 - DNA, 13 bp, Artificial Sequence
  synthetic sequence
gtggtggaagctg

SEQ ID NO: 9471 - DNA, 13 bp, Artificial Sequence
  synthetic sequence
ctgtgaatttctt

SEQ ID NO: 9472 - DNA, 13 bp, Artificial Sequence
  synthetic sequence
tctcacccaacat

SEQ ID NO: 9473 - DNA, 13 bp, Artificial Sequence
  synthetic sequence
tcatccattatca

SEQ ID NO: 9474 - DNA, 13 bp, Artificial Sequence
  synthetic sequence
ggggtgttcatga

SEQ ID NO: 9475 - DNA, 13 bp, Artificial Sequence
  synthetic sequence
tgatgttacgttc

SEQ ID NO: 9476 - DNA, 13 bp, Artificial Sequence
  synthetic sequence
caatacggtgttt

SEQ ID NO: 9477 - DNA, 13 bp, Artificial Sequence
  synthetic sequence
gcttcttcaaaat

SEQ ID NO: 9478 - DNA, 13 bp, Artificial Sequence
  synthetic sequence
catctttgacata

SEQ ID NO: 9479 - DNA, 13 bp, Artificial Sequence
  synthetic sequence
atgtttctttcag

SEQ ID NO: 9480 - DNA, 13 bp, Artificial Sequence
  synthetic sequence
gtgttgatgtcca

SEQ ID NO: 9481 - DNA, 13 bp, Artificial Sequence
  synthetic sequence
gcataggacacca

SEQ ID NO: 9482 - DNA, 13 bp, Artificial Sequence
  synthetic sequence
gctatggccctgg

SEQ ID NO: 9483 - DNA, 13 bp, Artificial Sequence
  synthetic sequence
tgtatgcaccttg

SEQ ID NO: 9484 - DNA, 13 bp, Artificial Sequence
  synthetic sequence
tacattatctgat

SEQ ID NO: 9485 - DNA, 13 bp, Artificial Sequence
  synthetic sequence
tgccaggccaata

SEQ ID NO: 9486 - DNA, 13 bp, Artificial Sequence
  synthetic sequence
tgtgtcaggcagg

SEQ ID NO: 9487 - DNA, 13 bp, Artificial Sequence
  synthetic sequence
tgtccctcttctt

SEQ ID NO: 9488 - DNA, 13 bp, Artificial Sequence
  synthetic sequence
tcgtgggctccaa

SEQ ID NO: 9489 - DNA, 13 bp, Artificial Sequence
  synthetic sequence
ttacactgcacgt

SEQ ID NO: 9490 - DNA, 13 bp, Artificial Sequence
  synthetic sequence
cacacactagtgg

SEQ ID NO: 9491 - DNA, 13 bp, Artificial Sequence
  synthetic sequence
gtgtttgggagag

SEQ ID NO: 9492 - DNA, 13 bp, Artificial Sequence
  synthetic sequence
actctgaccttag

SEQ ID NO: 9493 - DNA, 13 bp, Artificial Sequence
  synthetic sequence
atgtaatctactc

SEQ ID NO: 9494 - DNA, 13 bp, Artificial Sequence
  synthetic sequence
aaactccaactta

SEQ ID NO: 9495 - DNA, 13 bp, Artificial Sequence
  synthetic sequence
tcttgtgtggcta

SEQ ID NO: 9496 - DNA, 13 bp, Artificial Sequence
  synthetic sequence
aggcttcaatgtt

SEQ ID NO: 9497 - DNA, 13 bp, Artificial Sequence
  synthetic sequence
gctggatgacatg

SEQ ID NO: 9498 - DNA, 13 bp, Artificial Sequence
  synthetic sequence
gcaccactattct

SEQ ID NO: 9499 - DNA, 13 bp, Artificial Sequence
  synthetic sequence
atgtctagtgaca

SEQ ID NO: 9500 - DNA, 13 bp, Artificial Sequence
  synthetic sequence
ccatcacttgaat

SEQ ID NO: 9501 - DNA, 13 bp, Artificial Sequence
  synthetic sequence
acataattggatg

SEQ ID NO: 9502 - DNA, 13 bp, Artificial Sequence
  synthetic sequence
taatcaaaccctg

SEQ ID NO: 9503 - DNA, 13 bp, Artificial Sequence
  synthetic sequence
cacatctgctctg

SEQ ID NO: 9504 - DNA, 13 bp, Artificial Sequence
  synthetic sequence
aggccattctcat

SEQ ID NO: 9505 - DNA, 13 bp, Artificial Sequence
  synthetic sequence
aatggggccaatg

SEQ ID NO: 9506 - DNA, 13 bp, Artificial Sequence
  synthetic sequence
attcagtgaggca

SEQ ID NO: 9507 - DNA, 13 bp, Artificial Sequence
  synthetic sequence
gcagtgattattc

SEQ ID NO: 9508 - DNA, 13 bp, Artificial Sequence
  synthetic sequence
gacttgtcagctg

SEQ ID NO: 9509 - DNA, 13 bp, Artificial Sequence
  synthetic sequence
aaatcttgcttgc

SEQ ID NO: 9510 - DNA, 13 bp, Artificial Sequence
  synthetic sequence
ccagatggcatac

SEQ ID NO: 9511 - DNA, 13 bp, Artificial Sequence
  synthetic sequence
cgtacggcacgga

SEQ ID NO: 9512 - DNA, 13 bp, Artificial Sequence
  synthetic sequence
ccaactttctggg

SEQ ID NO: 9513 - DNA, 13 bp, Artificial Sequence
  synthetic sequence
cctggtgaggcat

SEQ ID NO: 9514 - DNA, 13 bp, Artificial Sequence
  synthetic sequence
gccttttgttcta

SEQ ID NO: 9515 - DNA, 13 bp, Artificial Sequence
  synthetic sequence
attgcctcttcaa

SEQ ID NO: 9516 - DNA, 13 bp, Artificial Sequence
  synthetic sequence
ggcagaagttccg

SEQ ID NO: 9517 - DNA, 13 bp, Artificial Sequence
  synthetic sequence
ccaagagactgtt

SEQ ID NO: 9518 - DNA, 13 bp, Artificial Sequence
  synthetic sequence
atgttgactatcc

SEQ ID NO: 9519 - DNA, 13 bp, Artificial Sequence
  synthetic sequence
catctgacattat

SEQ ID NO: 9520 - DNA, 13 bp, Artificial Sequence
  synthetic sequence
atgtctcttttct

SEQ ID NO: 9521 - DNA, 13 bp, Artificial Sequence
  synthetic sequence
tctttttgagcca

SEQ ID NO: 9522 - DNA, 13 bp, Artificial Sequence
  synthetic sequence
ctctggttggaaa

SEQ ID NO: 9523 - DNA, 13 bp, Artificial Sequence
  synthetic sequence
cacaattgttggt

SEQ ID NO: 9524 - DNA, 13 bp, Artificial Sequence
  synthetic sequence
tgaaatgcactgg

SEQ ID NO: 9525 - DNA, 13 bp, Artificial Sequence
  synthetic sequence
tcattgatgatca

SEQ ID NO: 9526 - DNA, 13 bp, Artificial Sequence
  synthetic sequence
gccaacggtatta

SEQ ID NO: 9527 - DNA, 13 bp, Artificial Sequence
  synthetic sequence
atctagctgggta

SEQ ID NO: 9528 - DNA, 13 bp, Artificial Sequence
  synthetic sequence
tacgggcaggtga

SEQ ID NO: 9529 - DNA, 13 bp, Artificial Sequence
  synthetic sequence
cggaattgtctac

SEQ ID NO: 9530 - DNA, 13 bp, Artificial Sequence
  synthetic sequence
acgtgcactgtat

SEQ ID NO: 9531 - DNA, 13 bp, Artificial Sequence
  synthetic sequence
gcattgctagccg

SEQ ID NO: 9532 - DNA, 13 bp, Artificial Sequence
  synthetic sequence
tttggttgagagg

SEQ ID NO: 9533 - DNA, 13 bp, Artificial Sequence
  synthetic sequence
tgacatcaaattc

SEQ ID NO: 9534 - DNA, 13 bp, Artificial Sequence
  synthetic sequence
tccacggcaccac

SEQ ID NO: 9535 - DNA, 13 bp, Artificial Sequence
  synthetic sequence
tggaagtgttttc

SEQ ID NO: 9536 - DNA, 13 bp, Artificial Sequence
  synthetic sequence
agtggaaggcact

SEQ ID NO: 9537 - DNA, 13 bp, Artificial Sequence
  synthetic sequence
ttatagtgatttc

SEQ ID NO: 9538 - DNA, 13 bp, Artificial Sequence
  synthetic sequence
acctggctgggta

SEQ ID NO: 9539 - DNA, 13 bp, Artificial Sequence
  synthetic sequence
tctctggatgaca

SEQ ID NO: 9540 - DNA, 13 bp, Artificial Sequence
  synthetic sequence
cccatgtgaaccg

SEQ ID NO: 9541 - DNA, 13 bp, Artificial Sequence
  synthetic sequence
gtgattataccta

SEQ ID NO: 9542 - DNA, 13 bp, Artificial Sequence
  synthetic sequence
aggttctttagca

SEQ ID NO: 9543 - DNA, 13 bp, Artificial Sequence
  synthetic sequence
tcaatgatagcca

SEQ ID NO: 9544 - DNA, 13 bp, Artificial Sequence
  synthetic sequence
tcacaataataca

SEQ ID NO: 9545 - DNA, 13 bp, Artificial Sequence
  synthetic sequence
tgttttccttctc

SEQ ID NO: 9546 - DNA, 13 bp, Artificial Sequence
  synthetic sequence
tcattgatgcact

SEQ ID NO: 9547 - DNA, 13 bp, Artificial Sequence
  synthetic sequence
aacccgtgtgaac

SEQ ID NO: 9548 - DNA, 13 bp, Artificial Sequence
  synthetic sequence
tcatccttcacat

SEQ ID NO: 9549 - DNA, 13 bp, Artificial Sequence
  synthetic sequence
tcttactccaaaa

SEQ ID NO: 9550 - DNA, 13 bp, Artificial Sequence
  synthetic sequence
aacgcgtcgaaga

SEQ ID NO: 9551 - DNA, 13 bp, Artificial Sequence
  synthetic sequence
ggggtgtgagcgt

SEQ ID NO: 9552 - DNA, 13 bp, Artificial Sequence
  synthetic sequence
cataaagcgagtc

SEQ ID NO: 9553 - DNA, 13 bp, Artificial Sequence
  synthetic sequence
cgcgttactagct

SEQ ID NO: 9554 - DNA, 13 bp, Artificial Sequence
  synthetic sequence
tggtatgtctatg

SEQ ID NO: 9555 - DNA, 13 bp, Artificial Sequence
  synthetic sequence
tcgtgagcgccta

SEQ ID NO: 9556 - DNA, 13 bp, Artificial Sequence
  synthetic sequence
ctaccgtaggcaa

SEQ ID NO: 9557 - DNA, 13 bp, Artificial Sequence
  synthetic sequence
tcttcttaagcca

SEQ ID NO: 9558 - DNA, 13 bp, Artificial Sequence
  synthetic sequence
gcgcaggtttatt

SEQ ID NO: 9559 - DNA, 13 bp, Artificial Sequence
  synthetic sequence
tgtctctggcttg

SEQ ID NO: 9560 - DNA, 13 bp, Artificial Sequence
  synthetic sequence
tttctcttggcca

SEQ ID NO: 9561 - DNA, 13 bp, Artificial Sequence
  synthetic sequence
gagaagagataat

SEQ ID NO: 9562 - DNA, 13 bp, Artificial Sequence
  synthetic sequence
tggtagtggtgtt

SEQ ID NO: 9563 - DNA, 13 bp, Artificial Sequence
  synthetic sequence
tggaaagcacttg

SEQ ID NO: 9564 - DNA, 13 bp, Artificial Sequence
  synthetic sequence
tcatgtctgcccc

SEQ ID NO: 9565 - DNA, 13 bp, Artificial Sequence
  synthetic sequence
ttatacatgacat

SEQ ID NO: 9566 - DNA, 13 bp, Artificial Sequence
  synthetic sequence
tatccatgtcaaa

SEQ ID NO: 9567 - DNA, 13 bp, Artificial Sequence
  synthetic sequence
cagtgtctagtgt

SEQ ID NO: 9568 - DNA, 13 bp, Artificial Sequence
  synthetic sequence
atgtttggggagt

SEQ ID NO: 9569 - DNA, 13 bp, Artificial Sequence
  synthetic sequence
ttgactgaatgga

SEQ ID NO: 9570 - DNA, 13 bp, Artificial Sequence
  synthetic sequence
actccaatttgtc

SEQ ID NO: 9571 - DNA, 13 bp, Artificial Sequence
  synthetic sequence
gcatcgaagattc

SEQ ID NO: 9572 - DNA, 13 bp, Artificial Sequence
  synthetic sequence
caatccaattcga

SEQ ID NO: 9573 - DNA, 13 bp, Artificial Sequence
  synthetic sequence
gttaatgttcctt

SEQ ID NO: 9574 - DNA, 13 bp, Artificial Sequence
  synthetic sequence
agcatggtgtgtg

SEQ ID NO: 9575 - DNA, 13 bp, Artificial Sequence
  synthetic sequence
gaaaggcactggg

SEQ ID NO: 9576 - DNA, 13 bp, Artificial Sequence
  synthetic sequence
agcatcttttaaa

SEQ ID NO: 9577 - DNA, 13 bp, Artificial Sequence
  synthetic sequence
tctccaaattggt

SEQ ID NO: 9578 - DNA, 13 bp, Artificial Sequence
  synthetic sequence
actggtagtcctt

SEQ ID NO: 9579 - DNA, 13 bp, Artificial Sequence
  synthetic sequence
gtggtgtctcgca

SEQ ID NO: 9580 - DNA, 13 bp, Artificial Sequence
  synthetic sequence
acattgttgaaca

SEQ ID NO: 9581 - DNA, 13 bp, Artificial Sequence
  synthetic sequence
gcgtgggttggta

SEQ ID NO: 9582 - DNA, 13 bp, Artificial Sequence
  synthetic sequence
ttgctccaaaata

SEQ ID NO: 9583 - DNA, 13 bp, Artificial Sequence
  synthetic sequence
cgtaattagatgt

SEQ ID NO: 9584 - DNA, 13 bp, Artificial Sequence
  synthetic sequence
gtgagtccatagt

SEQ ID NO: 9585 - DNA, 13 bp, Artificial Sequence
  synthetic sequence
gtgcacctggtgg

SEQ ID NO: 9586 - DNA, 13 bp, Artificial Sequence
  synthetic sequence
cgtcgttggacta

SEQ ID NO: 9587 - DNA, 13 bp, Artificial Sequence
  synthetic sequence
aggtaagctatcc

SEQ ID NO: 9588 - DNA, 13 bp, Artificial Sequence
  synthetic sequence
atttcaactgatg

SEQ ID NO: 9589 - DNA, 13 bp, Artificial Sequence
  synthetic sequence
atgtgaaaaattc

SEQ ID NO: 9590 - DNA, 13 bp, Artificial Sequence
  synthetic sequence
acatttggtgaat

SEQ ID NO: 9591 - DNA, 13 bp, Artificial Sequence
  synthetic sequence
ggtaggacaatag

SEQ ID NO: 9592 - DNA, 13 bp, Artificial Sequence
  synthetic sequence
actcttaggggtg

SEQ ID NO: 9593 - DNA, 13 bp, Artificial Sequence
  synthetic sequence
cctttgcttgtca

SEQ ID NO: 9594 - DNA, 13 bp, Artificial Sequence
  synthetic sequence
ttggacgccgcat

SEQ ID NO: 9595 - DNA, 13 bp, Artificial Sequence
  synthetic sequence
caatgtagttgga

SEQ ID NO: 9596 - DNA, 13 bp, Artificial Sequence
  synthetic sequence
atggcgctgtaca

SEQ ID NO: 9597 - DNA, 13 bp, Artificial Sequence
  synthetic sequence
taaactcaggcca

SEQ ID NO: 9598 - DNA, 13 bp, Artificial Sequence
  synthetic sequence
cagcattacatgc

SEQ ID NO: 9599 - DNA, 13 bp, Artificial Sequence
  synthetic sequence
gctacataggggt

SEQ ID NO: 9600 - DNA, 13 bp, Artificial Sequence
  synthetic sequence
tggctaaccccac

SEQ ID NO: 9601 - DNA, 13 bp, Artificial Sequence
  synthetic sequence
aatttgaagtgaa

SEQ ID NO: 9602 - DNA, 13 bp, Artificial Sequence
  synthetic sequence
ttcttgcgttgac

SEQ ID NO: 9603 - DNA, 13 bp, Artificial Sequence
  synthetic sequence
gatcatggtagtg

SEQ ID NO: 9604 - DNA, 13 bp, Artificial Sequence
  synthetic sequence
ttcctttctgttt

SEQ ID NO: 9605 - DNA, 13 bp, Artificial Sequence
  synthetic sequence
aggccaacacgta

SEQ ID NO: 9606 - DNA, 13 bp, Artificial Sequence
  synthetic sequence
tagtaatcatttg

SEQ ID NO: 9607 - DNA, 13 bp, Artificial Sequence
  synthetic sequence
gttgggaaattat

SEQ ID NO: 9608 - DNA, 13 bp, Artificial Sequence
  synthetic sequence
cattgcatgcttc

SEQ ID NO: 9609 - DNA, 13 bp, Artificial Sequence
  synthetic sequence
tccaaggcaccac

SEQ ID NO: 9610 - DNA, 13 bp, Artificial Sequence
  synthetic sequence
ctctatcgctata

SEQ ID NO: 9611 - DNA, 13 bp, Artificial Sequence
  synthetic sequence
agcatatgggatt

SEQ ID NO: 9612 - DNA, 13 bp, Artificial Sequence
  synthetic sequence
gacatgagttgtc

SEQ ID NO: 9613 - DNA, 13 bp, Artificial Sequence
  synthetic sequence
taagcacatttgt

SEQ ID NO: 9614 - DNA, 13 bp, Artificial Sequence
  synthetic sequence
aatagaatttcct

SEQ ID NO: 9615 - DNA, 13 bp, Artificial Sequence
  synthetic sequence
gtcctgcaaagag

SEQ ID NO: 9616 - DNA, 13 bp, Artificial Sequence
  synthetic sequence
tgtgggtgcccct

SEQ ID NO: 9617 - DNA, 13 bp, Artificial Sequence
  synthetic sequence
cacacaccaaggg

SEQ ID NO: 9618 - DNA, 13 bp, Artificial Sequence
  synthetic sequence
cacagtaatacac

SEQ ID NO: 9619 - DNA, 13 bp, Artificial Sequence
  synthetic sequence
ttgatgtcaattt

SEQ ID NO: 9620 - DNA, 13 bp, Artificial Sequence
  synthetic sequence
ttttgcaagtctt

SEQ ID NO: 9621 - DNA, 13 bp, Artificial Sequence
  synthetic sequence
gtctcacctggtg

SEQ ID NO: 9622 - DNA, 13 bp, Artificial Sequence
  synthetic sequence
ctagttggaaagt

SEQ ID NO: 9623 - DNA, 13 bp, Artificial Sequence
  synthetic sequence
cttaatcaagttc

SEQ ID NO: 9624 - DNA, 13 bp, Artificial Sequence
  synthetic sequence
ccacttccaaatg

SEQ ID NO: 9625 - DNA, 13 bp, Artificial Sequence
  synthetic sequence
aaacagttgtata

SEQ ID NO: 9626 - DNA, 13 bp, Artificial Sequence
  synthetic sequence
ggggtgttcataa

SEQ ID NO: 9627 - DNA, 13 bp, Artificial Sequence
  synthetic sequence
tgtccatatcaaa

SEQ ID NO: 9628 - DNA, 13 bp, Artificial Sequence
  synthetic sequence
actttgtgaacat

SEQ ID NO: 9629 - DNA, 13 bp, Artificial Sequence
  synthetic sequence
tggtttgatagaa

SEQ ID NO: 9630 - DNA, 13 bp, Artificial Sequence
  synthetic sequence
cctctccaccagc

SEQ ID NO: 9631 - DNA, 13 bp, Artificial Sequence
  synthetic sequence
cagactctgacat

SEQ ID NO: 9632 - DNA, 13 bp, Artificial Sequence
  synthetic sequence
ctcccccagctgt

SEQ ID NO: 9633 - DNA, 13 bp, Artificial Sequence
  synthetic sequence
tagtatgtgacaa

SEQ ID NO: 9634 - DNA, 13 bp, Artificial Sequence
  synthetic sequence
atgtgtgattgat

SEQ ID NO: 9635 - DNA, 13 bp, Artificial Sequence
  synthetic sequence
tcgttgatgcact

SEQ ID NO: 9636 - DNA, 13 bp, Artificial Sequence
  synthetic sequence
ttcctctctgttt

SEQ ID NO: 9637 - DNA, 13 bp, Artificial Sequence
  synthetic sequence
ggttagtggcgtt

SEQ ID NO: 9638 - DNA, 13 bp, Artificial Sequence
  synthetic sequence
gtagttttgatgt

SEQ ID NO: 9639 - DNA, 13 bp, Artificial Sequence
  synthetic sequence
tccatagtgttct

SEQ ID NO: 9640 - DNA, 13 bp, Artificial Sequence
  synthetic sequence
ggtaatccttggg

SEQ ID NO: 9641 - DNA, 13 bp, Artificial Sequence
  synthetic sequence
ctctcagtctgga

SEQ ID NO: 9642 - DNA, 13 bp, Artificial Sequence
  synthetic sequence
gtggagcgaatcc

SEQ ID NO: 9643 - DNA, 13 bp, Artificial Sequence
  synthetic sequence
tgtgctagcgctt

SEQ ID NO: 9644 - DNA, 13 bp, Artificial Sequence
  synthetic sequence
tgaaatgcacttg

SEQ ID NO: 9645 - DNA, 13 bp, Artificial Sequence
  synthetic sequence
caccatagaggga

SEQ ID NO: 9646 - DNA, 13 bp, Artificial Sequence
  synthetic sequence
atatggtactgaa

SEQ ID NO: 9647 - DNA, 13 bp, Artificial Sequence
  synthetic sequence
cacatcaaattca

SEQ ID NO: 9648 - DNA, 13 bp, Artificial Sequence
  synthetic sequence
aacgccattctca

SEQ ID NO: 9649 - DNA, 13 bp, Artificial Sequence
  synthetic sequence
tccaattgtttga

SEQ ID NO: 9650 - DNA, 13 bp, Artificial Sequence
  synthetic sequence
actctatcaccaa

SEQ ID NO: 9651 - DNA, 13 bp, Artificial Sequence
  synthetic sequence
gcgttgctagctg

SEQ ID NO: 9652 - DNA, 13 bp, Artificial Sequence
  synthetic sequence
gtggaagtgttct

SEQ ID NO: 9653 - DNA, 13 bp, Artificial Sequence
  synthetic sequence
tgtcccttttctt

SEQ ID NO: 9654 - DNA, 13 bp, Artificial Sequence
  synthetic sequence
caagaaccatttt

SEQ ID NO: 9655 - DNA, 13 bp, Artificial Sequence
  synthetic sequence
ggtactaccatag

SEQ ID NO: 9656 - DNA, 13 bp, Artificial Sequence
  synthetic sequence
tccatatcaaatc

SEQ ID NO: 9657 - DNA, 13 bp, Artificial Sequence
  synthetic sequence
ttcaaatcatcca

SEQ ID NO: 9658 - DNA, 13 bp, Artificial Sequence
  synthetic sequence
ttttactccaaaa

SEQ ID NO: 9659 - DNA, 13 bp, Artificial Sequence
  synthetic sequence
agcaccatcttta

SEQ ID NO: 9660 - DNA, 13 bp, Artificial Sequence
  synthetic sequence
atacggtaccgag

SEQ ID NO: 9661 - DNA, 13 bp, Artificial Sequence
  synthetic sequence
cattgataatcat

SEQ ID NO: 9662 - DNA, 13 bp, Artificial Sequence
  synthetic sequence
tgtctagcgacat

SEQ ID NO: 9663 - DNA, 13 bp, Artificial Sequence
  synthetic sequence
ctatccccggcca

SEQ ID NO: 9664 - DNA, 13 bp, Artificial Sequence
  synthetic sequence
tgtctctcttctt

SEQ ID NO: 9665 - DNA, 13 bp, Artificial Sequence
  synthetic sequence
attgtttcacctg

SEQ ID NO: 9666 - DNA, 13 bp, Artificial Sequence
  synthetic sequence
tgcactgcacgtg

SEQ ID NO: 9667 - DNA, 13 bp, Artificial Sequence
  synthetic sequence
tctcattcctctt

SEQ ID NO: 9668 - DNA, 13 bp, Artificial Sequence
  synthetic sequence
tctaattgcttta

SEQ ID NO: 9669 - DNA, 13 bp, Artificial Sequence
  synthetic sequence
cattgatacactc

SEQ ID NO: 9670 - DNA, 13 bp, Artificial Sequence
  synthetic sequence
ctgttcctctcat

SEQ ID NO: 9671 - DNA, 13 bp, Artificial Sequence
  synthetic sequence
agtcgaggcaggg

SEQ ID NO: 9672 - DNA, 13 bp, Artificial Sequence
  synthetic sequence
aaaagcactgggt

SEQ ID NO: 9673 - DNA, 13 bp, Artificial Sequence
  synthetic sequence
ttaaccattgcca

SEQ ID NO: 9674 - DNA, 13 bp, Artificial Sequence
  synthetic sequence
cacccttttgact

SEQ ID NO: 9675 - DNA, 13 bp, Artificial Sequence
  synthetic sequence
agttgtccacggt

SEQ ID NO: 9676 - DNA, 13 bp, Artificial Sequence
  synthetic sequence
ccaccgcccatat

SEQ ID NO: 9677 - DNA, 13 bp, Artificial Sequence
  synthetic sequence
atttagggatgct

SEQ ID NO: 9678 - DNA, 13 bp, Artificial Sequence
  synthetic sequence
tgttttctttctc

SEQ ID NO: 9679 - DNA, 13 bp, Artificial Sequence
  synthetic sequence
tcactatggtgtc

SEQ ID NO: 9680 - DNA, 13 bp, Artificial Sequence
  synthetic sequence
ctgggctcggtgt

SEQ ID NO: 9681 - DNA, 13 bp, Artificial Sequence
  synthetic sequence
tcaatatagttgg

SEQ ID NO: 9682 - DNA, 13 bp, Artificial Sequence
  synthetic sequence
gtcacaaattcga

SEQ ID NO: 9683 - DNA, 13 bp, Artificial Sequence
  synthetic sequence
tggttgggaaatt

SEQ ID NO: 9684 - DNA, 13 bp, Artificial Sequence
  synthetic sequence
ctaatgtgtgttg

SEQ ID NO: 9685 - DNA, 13 bp, Artificial Sequence
  synthetic sequence
tccagtttggttt

SEQ ID NO: 9686 - DNA, 13 bp, Artificial Sequence
  synthetic sequence
tgagccactgcca

SEQ ID NO: 9687 - DNA, 13 bp, Artificial Sequence
  synthetic sequence
cataagcaatcat

SEQ ID NO: 9688 - DNA, 13 bp, Artificial Sequence
  synthetic sequence
ttttcagctatag

SEQ ID NO: 9689 - DNA, 13 bp, Artificial Sequence
  synthetic sequence
caatggaaagaat

SEQ ID NO: 9690 - DNA, 13 bp, Artificial Sequence
  synthetic sequence
ttggggtacttgc

SEQ ID NO: 9691 - DNA, 13 bp, Artificial Sequence
  synthetic sequence
aggtttttcaaca

SEQ ID NO: 9692 - DNA, 13 bp, Artificial Sequence
  synthetic sequence
gggatgattcact

SEQ ID NO: 9693 - DNA, 13 bp, Artificial Sequence
  synthetic sequence
gcttcctcaaagt

SEQ ID NO: 9694 - DNA, 13 bp, Artificial Sequence
  synthetic sequence
gctaagacatagt

SEQ ID NO: 9695 - DNA, 13 bp, Artificial Sequence
  synthetic sequence
tgtgaacaagatg

SEQ ID NO: 9696 - DNA, 13 bp, Artificial Sequence
  synthetic sequence
tctgttcaatatg

SEQ ID NO: 9697 - DNA, 13 bp, Artificial Sequence
  synthetic sequence
tgagttcatcctt

SEQ ID NO: 9698 - DNA, 13 bp, Artificial Sequence
  synthetic sequence
atacactctgatt

SEQ ID NO: 9699 - DNA, 13 bp, Artificial Sequence
  synthetic sequence
ctatggctctagc

SEQ ID NO: 9700 - DNA, 13 bp, Artificial Sequence
  synthetic sequence
tgttgtatgacgt

SEQ ID NO: 9701 - DNA, 13 bp, Artificial Sequence
  synthetic sequence
tgctggctgatga

SEQ ID NO: 9702 - DNA, 13 bp, Artificial Sequence
  synthetic sequence
ccttgacatatgt

SEQ ID NO: 9703 - DNA, 13 bp, Artificial Sequence
  synthetic sequence
tcacaatagtaca

SEQ ID NO: 9704 - DNA, 13 bp, Artificial Sequence
  synthetic sequence
aatctaccctatc

SEQ ID NO: 9705 - DNA, 13 bp, Artificial Sequence
  synthetic sequence
tatctcttttctt

SEQ ID NO: 9706 - DNA, 13 bp, Artificial Sequence
  synthetic sequence
tgcacctggcaat

SEQ ID NO: 9707 - DNA, 13 bp, Artificial Sequence
  synthetic sequence
gtttgtacattac

SEQ ID NO: 9708 - DNA, 13 bp, Artificial Sequence
  synthetic sequence
ctcacattgttaa

SEQ ID NO: 9709 - DNA, 13 bp, Artificial Sequence
  synthetic sequence
aatgcgaatctcc

SEQ ID NO: 9710 - DNA, 13 bp, Artificial Sequence
  synthetic sequence
ccgaattgtccac

SEQ ID NO: 9711 - DNA, 13 bp, Artificial Sequence
  synthetic sequence
tgctccagaacaa

SEQ ID NO: 9712 - DNA, 13 bp, Artificial Sequence
  synthetic sequence
gcacaattattgg

SEQ ID NO: 9713 - DNA, 13 bp, Artificial Sequence
  synthetic sequence
taacagtttacca

SEQ ID NO: 9714 - DNA, 13 bp, Artificial Sequence
  synthetic sequence
gccaataggcaca

SEQ ID NO: 9715 - DNA, 13 bp, Artificial Sequence
  synthetic sequence
gccactaaacctt

SEQ ID NO: 9716 - DNA, 13 bp, Artificial Sequence
  synthetic sequence
cgtaggtgaccaa

SEQ ID NO: 9717 - DNA, 13 bp, Artificial Sequence
  synthetic sequence
tgaaatgcactag

SEQ ID NO: 9718 - DNA, 13 bp, Artificial Sequence
  synthetic sequence
gtacatgacgtac

SEQ ID NO: 9719 - DNA, 13 bp, Artificial Sequence
  synthetic sequence
actgcgtagtcaa

SEQ ID NO: 9720 - DNA, 13 bp, Artificial Sequence
  synthetic sequence
atcctggcccttg

SEQ ID NO: 9721 - DNA, 13 bp, Artificial Sequence
  synthetic sequence
agccattgccagg

SEQ ID NO: 9722 - DNA, 13 bp, Artificial Sequence
  synthetic sequence
tttagatcatcca

SEQ ID NO: 9723 - DNA, 13 bp, Artificial Sequence
  synthetic sequence
aatcccttttctg

SEQ ID NO: 9724 - DNA, 13 bp, Artificial Sequence
  synthetic sequence
acgtaatttgacg

SEQ ID NO: 9725 - DNA, 13 bp, Artificial Sequence
  synthetic sequence
tcgccgcaccgta

SEQ ID NO: 9726 - DNA, 13 bp, Artificial Sequence
  synthetic sequence
aatttaaaggggc

SEQ ID NO: 9727 - DNA, 13 bp, Artificial Sequence
  synthetic sequence
cctggtgaggcgt

SEQ ID NO: 9728 - DNA, 13 bp, Artificial Sequence
  synthetic sequence
tatacactcggga

SEQ ID NO: 9729 - DNA, 13 bp, Artificial Sequence
  synthetic sequence
agttatccacagt

SEQ ID NO: 9730 - DNA, 13 bp, Artificial Sequence
  synthetic sequence
tttctgtgatgag

SEQ ID NO: 9731 - DNA, 13 bp, Artificial Sequence
  synthetic sequence
caacgggacaaca

SEQ ID NO: 9732 - DNA, 13 bp, Artificial Sequence
  synthetic sequence
gtgacattaattg

SEQ ID NO: 9733 - DNA, 13 bp, Artificial Sequence
  synthetic sequence
cgataccgacgta

SEQ ID NO: 9734 - DNA, 13 bp, Artificial Sequence
  synthetic sequence
aacagacaggtag

SEQ ID NO: 9735 - DNA, 13 bp, Artificial Sequence
  synthetic sequence
caacacctcttaa

SEQ ID NO: 9736 - DNA, 13 bp, Artificial Sequence
  synthetic sequence
ctctgatgtgttt

SEQ ID NO: 9737 - DNA, 13 bp, Artificial Sequence
  synthetic sequence
gaattaatgtagt

SEQ ID NO: 9738 - DNA, 13 bp, Artificial Sequence
  synthetic sequence
cgtaggggtatcc

SEQ ID NO: 9739 - DNA, 13 bp, Artificial Sequence
  synthetic sequence
ttctccaacacca

SEQ ID NO: 9740 - DNA, 13 bp, Artificial Sequence
  synthetic sequence
gtaaatccaatga

SEQ ID NO: 9741 - DNA, 13 bp, Artificial Sequence
  synthetic sequence
gaaaatggcttcc

SEQ ID NO: 9742 - DNA, 13 bp, Artificial Sequence
  synthetic sequence
atggccactgaat

SEQ ID NO: 9743 - DNA, 13 bp, Artificial Sequence
  synthetic sequence
gcctggtggtaca

SEQ ID NO: 9744 - DNA, 13 bp, Artificial Sequence
  synthetic sequence
tgcttcggcttca

SEQ ID NO: 9745 - DNA, 13 bp, Artificial Sequence
  synthetic sequence
atgaatttccttc

SEQ ID NO: 9746 - DNA, 13 bp, Artificial Sequence
  synthetic sequence
aatctccttcatt

SEQ ID NO: 9747 - DNA, 13 bp, Artificial Sequence
  synthetic sequence
cgcctcaatgttc

SEQ ID NO: 9748 - DNA, 13 bp, Artificial Sequence
  synthetic sequence
tgcacggtgtaac

SEQ ID NO: 9749 - DNA, 13 bp, Artificial Sequence
  synthetic sequence
tttgctccagaat

SEQ ID NO: 9750 - DNA, 13 bp, Artificial Sequence
  synthetic sequence
tttcgtgagctcc

SEQ ID NO: 9751 - DNA, 13 bp, Artificial Sequence
  synthetic sequence
acggtgaaacatc

SEQ ID NO: 9752 - DNA, 13 bp, Artificial Sequence
  synthetic sequence
ggcgatgtctggt

SEQ ID NO: 9753 - DNA, 13 bp, Artificial Sequence
  synthetic sequence
accaaatttttga

SEQ ID NO: 9754 - DNA, 13 bp, Artificial Sequence
  synthetic sequence
agtttggttttgg

SEQ ID NO: 9755 - DNA, 13 bp, Artificial Sequence
  synthetic sequence
ttacagcattttg

SEQ ID NO: 9756 - DNA, 13 bp, Artificial Sequence
  synthetic sequence
gaagtaaagctaa

SEQ ID NO: 9757 - DNA, 13 bp, Artificial Sequence
  synthetic sequence
gccaagtggtagt

SEQ ID NO: 9758 - DNA, 13 bp, Artificial Sequence
  synthetic sequence
agcgtcccatcct

SEQ ID NO: 9759 - DNA, 13 bp, Artificial Sequence
  synthetic sequence
ttcttcaacaatt

SEQ ID NO: 9760 - DNA, 13 bp, Artificial Sequence
  synthetic sequence
aatccgggctgga

SEQ ID NO: 9761 - DNA, 13 bp, Artificial Sequence
  synthetic sequence
cacatctgttctg

SEQ ID NO: 9762 - DNA, 13 bp, Artificial Sequence
  synthetic sequence
gagaaaatggcct

SEQ ID NO: 9763 - DNA, 13 bp, Artificial Sequence
  synthetic sequence
atatgggactggt

SEQ ID NO: 9764 - DNA, 13 bp, Artificial Sequence
  synthetic sequence
cgttacatgcctc

SEQ ID NO: 9765 - DNA, 13 bp, Artificial Sequence
  synthetic sequence
tgttcctctcagt

SEQ ID NO: 9766 - DNA, 13 bp, Artificial Sequence
  synthetic sequence
aatctcctggtgt

SEQ ID NO: 9767 - DNA, 13 bp, Artificial Sequence
  synthetic sequence
tccaccctgtcac

SEQ ID NO: 9768 - DNA, 13 bp, Artificial Sequence
  synthetic sequence
ttgtccctggcct

SEQ ID NO: 9769 - DNA, 13 bp, Artificial Sequence
  synthetic sequence
agagggcagcatc

SEQ ID NO: 9770 - DNA, 13 bp, Artificial Sequence
  synthetic sequence
gtgaagcgtgggt

SEQ ID NO: 9771 - DNA, 13 bp, Artificial Sequence
  synthetic sequence
atacatgatctga

SEQ ID NO: 9772 - DNA, 13 bp, Artificial Sequence
  synthetic sequence
aagtctagtggtg

SEQ ID NO: 9773 - DNA, 13 bp, Artificial Sequence
  synthetic sequence
tgctctagcaatt

SEQ ID NO: 9774 - DNA, 13 bp, Artificial Sequence
  synthetic sequence
tgtgcaaagtctt

SEQ ID NO: 9775 - DNA, 13 bp, Artificial Sequence
  synthetic sequence
atgcgcttggttc

SEQ ID NO: 9776 - DNA, 13 bp, Artificial Sequence
  synthetic sequence
cctgacgtgtttg

SEQ ID NO: 9777 - DNA, 13 bp, Artificial Sequence
  synthetic sequence
tttgcacttgact

SEQ ID NO: 9778 - DNA, 13 bp, Artificial Sequence
  synthetic sequence
aacgagtcacctt

SEQ ID NO: 9779 - DNA, 13 bp, Artificial Sequence
  synthetic sequence
agcttgtctcttg

SEQ ID NO: 9780 - DNA, 13 bp, Artificial Sequence
  synthetic sequence
atggcaacataag

SEQ ID NO: 9781 - DNA, 13 bp, Artificial Sequence
  synthetic sequence
cttgatgtctatt

SEQ ID NO: 9782 - DNA, 13 bp, Artificial Sequence
  synthetic sequence
tggacgagatact

SEQ ID NO: 9783 - DNA, 13 bp, Artificial Sequence
  synthetic sequence
gtcgtccatgatg

SEQ ID NO: 9784 - DNA, 13 bp, Artificial Sequence
  synthetic sequence
aacccgattttct

SEQ ID NO: 9785 - DNA, 13 bp, Artificial Sequence
  synthetic sequence
taatgaggttttt

SEQ ID NO: 9786 - DNA, 13 bp, Artificial Sequence
  synthetic sequence
gaatccaacactc

SEQ ID NO: 9787 - DNA, 13 bp, Artificial Sequence
  synthetic sequence
gatggagcattga

SEQ ID NO: 9788 - DNA, 13 bp, Artificial Sequence
  synthetic sequence
ggcaacccttgag

SEQ ID NO: 9789 - DNA, 13 bp, Artificial Sequence
  synthetic sequence
gtcctcttgtgta

SEQ ID NO: 9790 - DNA, 13 bp, Artificial Sequence
  synthetic sequence
gtagatcttctgt

SEQ ID NO: 9791 - DNA, 13 bp, Artificial Sequence
  synthetic sequence
agttgctttaatt

SEQ ID NO: 9792 - DNA, 13 bp, Artificial Sequence
  synthetic sequence
cacacaccagggg

SEQ ID NO: 9793 - DNA, 13 bp, Artificial Sequence
  synthetic sequence
ccttcaccaccgg

SEQ ID NO: 9794 - DNA, 13 bp, Artificial Sequence
  synthetic sequence
ggatgtccatatc

SEQ ID NO: 9795 - DNA, 13 bp, Artificial Sequence
  synthetic sequence
caccattgtgcca

SEQ ID NO: 9796 - DNA, 13 bp, Artificial Sequence
  synthetic sequence
tttctgataatgg

SEQ ID NO: 9797 - DNA, 13 bp, Artificial Sequence
  synthetic sequence
gtagaatggccac

SEQ ID NO: 9798 - DNA, 13 bp, Artificial Sequence
  synthetic sequence
tgagttcatcttt

SEQ ID NO: 9799 - DNA, 13 bp, Artificial Sequence
  synthetic sequence
gacatcaattgtc

SEQ ID NO: 9800 - DNA, 13 bp, Artificial Sequence
  synthetic sequence
agtgtaccatcct

SEQ ID NO: 9801 - DNA, 13 bp, Artificial Sequence
  synthetic sequence
atgttaacaatcc

SEQ ID NO: 9802 - DNA, 13 bp, Artificial Sequence
  synthetic sequence
gtgaacttcttca

SEQ ID NO: 9803 - DNA, 13 bp, Artificial Sequence
  synthetic sequence
gaatggataacca

SEQ ID NO: 9804 - DNA, 13 bp, Artificial Sequence
  synthetic sequence
gtctcacccggtg

SEQ ID NO: 9805 - DNA, 13 bp, Artificial Sequence
  synthetic sequence
cagatttgtcggc

SEQ ID NO: 9806 - DNA, 13 bp, Artificial Sequence
  synthetic sequence
atgttagatctcc

SEQ ID NO: 9807 - DNA, 13 bp, Artificial Sequence
  synthetic sequence
gtctggtaaaaca

SEQ ID NO: 9808 - DNA, 13 bp, Artificial Sequence
  synthetic sequence
tcaaggttggttc

SEQ ID NO: 9809 - DNA, 13 bp, Artificial Sequence
  synthetic sequence
acaattgttagtg

SEQ ID NO: 9810 - DNA, 13 bp, Artificial Sequence
  synthetic sequence
gagatgagatgat

SEQ ID NO: 9811 - DNA, 13 bp, Artificial Sequence
  synthetic sequence
ccaccaccatcct

SEQ ID NO: 9812 - DNA, 13 bp, Artificial Sequence
  synthetic sequence
aagcgcctagcta

SEQ ID NO: 9813 - DNA, 13 bp, Artificial Sequence
  synthetic sequence
tcactgcgttttg

SEQ ID NO: 9814 - DNA, 13 bp, Artificial Sequence
  synthetic sequence
agctgcacctggc

SEQ ID NO: 9815 - DNA, 13 bp, Artificial Sequence
  synthetic sequence
attacaggtagcc

SEQ ID NO: 9816 - DNA, 13 bp, Artificial Sequence
  synthetic sequence
agtaatgctagtg

SEQ ID NO: 9817 - DNA, 13 bp, Artificial Sequence
  synthetic sequence
agtccaaatctcg

SEQ ID NO: 9818 - DNA, 13 bp, Artificial Sequence
  synthetic sequence
ataatgaagaaaa

SEQ ID NO: 9819 - DNA, 13 bp, Artificial Sequence
  synthetic sequence
aatgcctttggag

SEQ ID NO: 9820 - DNA, 13 bp, Artificial Sequence
  synthetic sequence
ttagatggactaa

SEQ ID NO: 9821 - DNA, 13 bp, Artificial Sequence
  synthetic sequence
tgcaaaatccaga

SEQ ID NO: 9822 - DNA, 13 bp, Artificial Sequence
  synthetic sequence
ttgcaaatgcaaa

SEQ ID NO: 9823 - DNA, 13 bp, Artificial Sequence
  synthetic sequence
caccatggagcta

SEQ ID NO: 9824 - DNA, 13 bp, Artificial Sequence
  synthetic sequence
agaatagtgaatg

SEQ ID NO: 9825 - DNA, 13 bp, Artificial Sequence
  synthetic sequence
ccaacaagagctg

SEQ ID NO: 9826 - DNA, 13 bp, Artificial Sequence
  synthetic sequence
tggacattgaagt

SEQ ID NO: 9827 - DNA, 13 bp, Artificial Sequence
  synthetic sequence
atacacaaggtga

SEQ ID NO: 9828 - DNA, 13 bp, Artificial Sequence
  synthetic sequence
aagtttttgaagg

SEQ ID NO: 9829 - DNA, 13 bp, Artificial Sequence
  synthetic sequence
ggagaaatctttg

SEQ ID NO: 9830 - DNA, 13 bp, Artificial Sequence
  synthetic sequence
gggggtggaattg

SEQ ID NO: 9831 - DNA, 13 bp, Artificial Sequence
  synthetic sequence
gtccatacacagg

SEQ ID NO: 9832 - DNA, 13 bp, Artificial Sequence
  synthetic sequence
tgttaatggatga

SEQ ID NO: 9833 - DNA, 13 bp, Artificial Sequence
  synthetic sequence
aaaccatgcctca

SEQ ID NO: 9834 - DNA, 13 bp, Artificial Sequence
  synthetic sequence
gattggcaatcag

SEQ ID NO: 9835 - DNA, 13 bp, Artificial Sequence
  synthetic sequence
ttaactcagcata

SEQ ID NO: 9836 - DNA, 13 bp, Artificial Sequence
  synthetic sequence
aatcatatcagca

SEQ ID NO: 9837 - DNA, 13 bp, Artificial Sequence
  synthetic sequence
atagattatttgt

SEQ ID NO: 9838 - DNA, 13 bp, Artificial Sequence
  synthetic sequence
gaaaaatcagaag

SEQ ID NO: 9839 - DNA, 13 bp, Artificial Sequence
  synthetic sequence
cacgcatctgttg

SEQ ID NO: 9840 - DNA, 13 bp, Artificial Sequence
  synthetic sequence
taaatgaccttct

SEQ ID NO: 9841 - DNA, 13 bp, Artificial Sequence
  synthetic sequence
atcccatacccct

SEQ ID NO: 9842 - DNA, 13 bp, Artificial Sequence
  synthetic sequence
acagaagttaccc

SEQ ID NO: 9843 - DNA, 13 bp, Artificial Sequence
  synthetic sequence
catttttaatagc

SEQ ID NO: 9844 - DNA, 13 bp, Artificial Sequence
  synthetic sequence
ccaggtacagcaa

SEQ ID NO: 9845 - DNA, 13 bp, Artificial Sequence
  synthetic sequence
cagcagacaaagg

SEQ ID NO: 9846 - DNA, 13 bp, Artificial Sequence
  synthetic sequence
cacccatcaaatg

SEQ ID NO: 9847 - DNA, 13 bp, Artificial Sequence
  synthetic sequence
acactatgatcaa

SEQ ID NO: 9848 - DNA, 13 bp, Artificial Sequence
  synthetic sequence
tgtatatcccagt

SEQ ID NO: 9849 - DNA, 13 bp, Artificial Sequence
  synthetic sequence
atagtcaaattag

SEQ ID NO: 9850 - DNA, 13 bp, Artificial Sequence
  synthetic sequence
caaggtaccagac

SEQ ID NO: 9851 - DNA, 13 bp, Artificial Sequence
  synthetic sequence
gaatttgtgcaaa

SEQ ID NO: 9852 - DNA, 13 bp, Artificial Sequence
  synthetic sequence
catgcaatgctct

SEQ ID NO: 9853 - DNA, 13 bp, Artificial Sequence
  synthetic sequence
atgttattgctag

SEQ ID NO: 9854 - DNA, 13 bp, Artificial Sequence
  synthetic sequence
gaaagtacgcacc

SEQ ID NO: 9855 - DNA, 13 bp, Artificial Sequence
  synthetic sequence
atatttaatagac

SEQ ID NO: 9856 - DNA, 13 bp, Artificial Sequence
  synthetic sequence
aaagatgctgccc

SEQ ID NO: 9857 - DNA, 13 bp, Artificial Sequence
  synthetic sequence
gaatatagaacca

SEQ ID NO: 9858 - DNA, 13 bp, Artificial Sequence
  synthetic sequence
gggctatcacaga

SEQ ID NO: 9859 - DNA, 13 bp, Artificial Sequence
  synthetic sequence
gatcaagagaaaa

SEQ ID NO: 9860 - DNA, 13 bp, Artificial Sequence
  synthetic sequence
gagtatagaacca

SEQ ID NO: 9861 - DNA, 13 bp, Artificial Sequence
  synthetic sequence
gaggggatattta

SEQ ID NO: 9862 - DNA, 13 bp, Artificial Sequence
  synthetic sequence
atatttaacagac

SEQ ID NO: 9863 - DNA, 13 bp, Artificial Sequence
  synthetic sequence
tgatttgtggaaa

SEQ ID NO: 9864 - DNA, 13 bp, Artificial Sequence
  synthetic sequence
tgattgcctatgg

SEQ ID NO: 9865 - DNA, 13 bp, Artificial Sequence
  synthetic sequence
tcacactactgta

SEQ ID NO: 9866 - DNA, 13 bp, Artificial Sequence
  synthetic sequence
tatcacaaaagat

SEQ ID NO: 9867 - DNA, 13 bp, Artificial Sequence
  synthetic sequence
tgcggaagcagga

SEQ ID NO: 9868 - DNA, 13 bp, Artificial Sequence
  synthetic sequence
ccggtgatagaaa

SEQ ID NO: 9869 - DNA, 13 bp, Artificial Sequence
  synthetic sequence
ttccagttggaca

SEQ ID NO: 9870 - DNA, 13 bp, Artificial Sequence
  synthetic sequence
gggaaaatgtaac

SEQ ID NO: 9871 - DNA, 13 bp, Artificial Sequence
  synthetic sequence
ttggaaaccttta

SEQ ID NO: 9872 - DNA, 13 bp, Artificial Sequence
  synthetic sequence
atagtcaaattgg

SEQ ID NO: 9873 - DNA, 13 bp, Artificial Sequence
  synthetic sequence
gtgccatgtatgg

SEQ ID NO: 9874 - DNA, 13 bp, Artificial Sequence
  synthetic sequence
agtagagctttta

SEQ ID NO: 9875 - DNA, 13 bp, Artificial Sequence
  synthetic sequence
gctctaatcaaaa

SEQ ID NO: 9876 - DNA, 13 bp, Artificial Sequence
  synthetic sequence
gtaatgctagcgt

SEQ ID NO: 9877 - DNA, 13 bp, Artificial Sequence
  synthetic sequence
atacaggggttta

SEQ ID NO: 9878 - DNA, 13 bp, Artificial Sequence
  synthetic sequence
cagctcctgatgc

SEQ ID NO: 9879 - DNA, 13 bp, Artificial Sequence
  synthetic sequence
ggaactctgtaca

SEQ ID NO: 9880 - DNA, 13 bp, Artificial Sequence
  synthetic sequence
tcagcatactcag

SEQ ID NO: 9881 - DNA, 13 bp, Artificial Sequence
  synthetic sequence
ccacacatgcatc

SEQ ID NO: 9882 - DNA, 13 bp, Artificial Sequence
  synthetic sequence
caggtaacaaaat

SEQ ID NO: 9883 - DNA, 13 bp, Artificial Sequence
  synthetic sequence
tttgcttttgact

SEQ ID NO: 9884 - DNA, 13 bp, Artificial Sequence
  synthetic sequence
tagaaaaattaga

SEQ ID NO: 9885 - DNA, 13 bp, Artificial Sequence
  synthetic sequence
tctttcatagatt

SEQ ID NO: 9886 - DNA, 13 bp, Artificial Sequence
  synthetic sequence
ccaaaagtttaga

SEQ ID NO: 9887 - DNA, 13 bp, Artificial Sequence
  synthetic sequence
tacaaagactcaa

SEQ ID NO: 9888 - DNA, 13 bp, Artificial Sequence
  synthetic sequence
tattccttgcctc

SEQ ID NO: 9889 - DNA, 13 bp, Artificial Sequence
  synthetic sequence
tttgaaggttcaa

SEQ ID NO: 9890 - DNA, 13 bp, Artificial Sequence
  synthetic sequence
cttactttaccga

SEQ ID NO: 9891 - DNA, 13 bp, Artificial Sequence
  synthetic sequence
agaccatgcctca

SEQ ID NO: 9892 - DNA, 13 bp, Artificial Sequence
  synthetic sequence
tacacaggaattc

SEQ ID NO: 9893 - DNA, 13 bp, Artificial Sequence
  synthetic sequence
gactggcaatcag

SEQ ID NO: 9894 - DNA, 13 bp, Artificial Sequence
  synthetic sequence
ggaactctataca

SEQ ID NO: 9895 - DNA, 13 bp, Artificial Sequence
  synthetic sequence
cagttggtttcac

SEQ ID NO: 9896 - DNA, 13 bp, Artificial Sequence
  synthetic sequence
ggaggtggaattg

SEQ ID NO: 9897 - DNA, 13 bp, Artificial Sequence
  synthetic sequence
ttgatctgtggaa

SEQ ID NO: 9898 - DNA, 13 bp, Artificial Sequence
  synthetic sequence
aaaccagggacac

SEQ ID NO: 9899 - DNA, 13 bp, Artificial Sequence
  synthetic sequence
tctatgttctgcc

SEQ ID NO: 9900 - DNA, 13 bp, Artificial Sequence
  synthetic sequence
tccaatattattc

SEQ ID NO: 9901 - DNA, 13 bp, Artificial Sequence
  synthetic sequence
gtacacaagataa

SEQ ID NO: 9902 - DNA, 13 bp, Artificial Sequence
  synthetic sequence
gcatgcaatgccc

SEQ ID NO: 9903 - DNA, 13 bp, Artificial Sequence
  synthetic sequence
ggtcacagattca

SEQ ID NO: 9904 - DNA, 13 bp, Artificial Sequence
  synthetic sequence
tgttcatacttag

SEQ ID NO: 9905 - DNA, 13 bp, Artificial Sequence
  synthetic sequence
cagaaaagcaaga

SEQ ID NO: 9906 - DNA, 13 bp, Artificial Sequence
  synthetic sequence
ttcaatattactc

SEQ ID NO: 9907 - DNA, 13 bp, Artificial Sequence
  synthetic sequence
tattcaatactat

SEQ ID NO: 9908 - DNA, 13 bp, Artificial Sequence
  synthetic sequence
ataatggagagga

SEQ ID NO: 9909 - DNA, 13 bp, Artificial Sequence
  synthetic sequence
agatggaccaaag

SEQ ID NO: 9910 - DNA, 13 bp, Artificial Sequence
  synthetic sequence
cagttaccggtga

SEQ ID NO: 9911 - DNA, 13 bp, Artificial Sequence
  synthetic sequence
aactacttgtaga

SEQ ID NO: 9912 - DNA, 13 bp, Artificial Sequence
  synthetic sequence
tagattacttgtg

SEQ ID NO: 9913 - DNA, 13 bp, Artificial Sequence
  synthetic sequence
tatatacaaactt

SEQ ID NO: 9914 - DNA, 13 bp, Artificial Sequence
  synthetic sequence
gtttacagaaaca

SEQ ID NO: 9915 - DNA, 13 bp, Artificial Sequence
  synthetic sequence
ccacacaagattg

SEQ ID NO: 9916 - DNA, 13 bp, Artificial Sequence
  synthetic sequence
atatatgagtatt

SEQ ID NO: 9917 - DNA, 13 bp, Artificial Sequence
  synthetic sequence
acatcccagttgg

SEQ ID NO: 9918 - DNA, 13 bp, Artificial Sequence
  synthetic sequence
actccttgcctcc

SEQ ID NO: 9919 - DNA, 13 bp, Artificial Sequence
  synthetic sequence
cagtcagctatct

SEQ ID NO: 9920 - DNA, 13 bp, Artificial Sequence
  synthetic sequence
tcactgatatcag

SEQ ID NO: 9921 - DNA, 13 bp, Artificial Sequence
  synthetic sequence
cataatatagtga

SEQ ID NO: 9922 - DNA, 13 bp, Artificial Sequence
  synthetic sequence
aacacaggggttt

SEQ ID NO: 9923 - DNA, 13 bp, Artificial Sequence
  synthetic sequence
gctcttagaggtc

SEQ ID NO: 9924 - DNA, 13 bp, Artificial Sequence
  synthetic sequence
ttgacaccaattg

SEQ ID NO: 9925 - DNA, 13 bp, Artificial Sequence
  synthetic sequence
acgaatctaacca

SEQ ID NO: 9926 - DNA, 13 bp, Artificial Sequence
  synthetic sequence
gtctaagactaga

SEQ ID NO: 9927 - DNA, 13 bp, Artificial Sequence
  synthetic sequence
gttctgttgttgg

SEQ ID NO: 9928 - DNA, 13 bp, Artificial Sequence
  synthetic sequence
ttcatgtaaaccc

SEQ ID NO: 9929 - DNA, 13 bp, Artificial Sequence
  synthetic sequence
gggatttttgacc

SEQ ID NO: 9930 - DNA, 13 bp, Artificial Sequence
  synthetic sequence
tcatagcaactga

SEQ ID NO: 9931 - DNA, 13 bp, Artificial Sequence
  synthetic sequence
atcttgctatttg

SEQ ID NO: 9932 - DNA, 13 bp, Artificial Sequence
  synthetic sequence
gatcatctgctct

SEQ ID NO: 9933 - DNA, 13 bp, Artificial Sequence
  synthetic sequence
ccaattagcatat

SEQ ID NO: 9934 - DNA, 13 bp, Artificial Sequence
  synthetic sequence
gctccatttccac

SEQ ID NO: 9935 - DNA, 13 bp, Artificial Sequence
  synthetic sequence
gatcttgcattag

SEQ ID NO: 9936 - DNA, 13 bp, Artificial Sequence
  synthetic sequence
ttaagcctaggat

SEQ ID NO: 9937 - DNA, 13 bp, Artificial Sequence
  synthetic sequence
gcatttggtgctc

SEQ ID NO: 9938 - DNA, 13 bp, Artificial Sequence
  synthetic sequence
agaaaatgtctga

SEQ ID NO: 9939 - DNA, 13 bp, Artificial Sequence
  synthetic sequence
ctggatttattcc

SEQ ID NO: 9940 - DNA, 13 bp, Artificial Sequence
  synthetic sequence
tgcgtgacaaagc

SEQ ID NO: 9941 - DNA, 13 bp, Artificial Sequence
  synthetic sequence
acttcttgagaat

SEQ ID NO: 9942 - DNA, 13 bp, Artificial Sequence
  synthetic sequence
aacaggcaaacca

SEQ ID NO: 9943 - DNA, 13 bp, Artificial Sequence
  synthetic sequence
cataattggtgac

SEQ ID NO: 9944 - DNA, 13 bp, Artificial Sequence
  synthetic sequence
ctgaaattttgat

SEQ ID NO: 9945 - DNA, 13 bp, Artificial Sequence
  synthetic sequence
tctctaagtgcac

SEQ ID NO: 9946 - DNA, 13 bp, Artificial Sequence
  synthetic sequence
acaccagctattg

SEQ ID NO: 9947 - DNA, 13 bp, Artificial Sequence
  synthetic sequence
taagccagttgat

SEQ ID NO: 9948 - DNA, 13 bp, Artificial Sequence
  synthetic sequence
tcagtatctaacc

SEQ ID NO: 9949 - DNA, 13 bp, Artificial Sequence
  synthetic sequence
taaaccctaatta

SEQ ID NO: 9950 - DNA, 13 bp, Artificial Sequence
  synthetic sequence
aagaccctacaaa

SEQ ID NO: 9951 - DNA, 13 bp, Artificial Sequence
  synthetic sequence
aactagccattgg

SEQ ID NO: 9952 - DNA, 13 bp, Artificial Sequence
  synthetic sequence
aatcctgcactgg

SEQ ID NO: 9953 - DNA, 13 bp, Artificial Sequence
  synthetic sequence
catggtgaactca

SEQ ID NO: 9954 - DNA, 13 bp, Artificial Sequence
  synthetic sequence
gttacaaaaggta

SEQ ID NO: 9955 - DNA, 13 bp, Artificial Sequence
  synthetic sequence
tgtgtgtttctgg

SEQ ID NO: 9956 - DNA, 13 bp, Artificial Sequence
  synthetic sequence
cctgcttctgcca

SEQ ID NO: 9957 - DNA, 13 bp, Artificial Sequence
  synthetic sequence
gtccttgcacttt

SEQ ID NO: 9958 - DNA, 13 bp, Artificial Sequence
  synthetic sequence
tctaatggttcta

SEQ ID NO: 9959 - DNA, 13 bp, Artificial Sequence
  synthetic sequence
taagaagaccgat

SEQ ID NO: 9960 - DNA, 13 bp, Artificial Sequence
  synthetic sequence
gagggcattccac

SEQ ID NO: 9961 - DNA, 13 bp, Artificial Sequence
  synthetic sequence
gtctaggtacata

SEQ ID NO: 9962 - DNA, 13 bp, Artificial Sequence
  synthetic sequence
cacaccccactct

SEQ ID NO: 9963 - DNA, 13 bp, Artificial Sequence
  synthetic sequence
tgggtaatattca

SEQ ID NO: 9964 - DNA, 13 bp, Artificial Sequence
  synthetic sequence
tatccatcaaaat

SEQ ID NO: 9965 - DNA, 13 bp, Artificial Sequence
  synthetic sequence
aatgctagtgtgg

SEQ ID NO: 9966 - DNA, 13 bp, Artificial Sequence
  synthetic sequence
tctggtttgcaca

SEQ ID NO: 9967 - DNA, 13 bp, Artificial Sequence
  synthetic sequence
ttgacatgtccaa

SEQ ID NO: 9968 - DNA, 13 bp, Artificial Sequence
  synthetic sequence
gtagctgtgactg

SEQ ID NO: 9969 - DNA, 13 bp, Artificial Sequence
  synthetic sequence
gtttgtacccatc

SEQ ID NO: 9970 - DNA, 13 bp, Artificial Sequence
  synthetic sequence
tgggccttcaaag

SEQ ID NO: 9971 - DNA, 13 bp, Artificial Sequence
  synthetic sequence
cccacataatgat

SEQ ID NO: 9972 - DNA, 13 bp, Artificial Sequence
  synthetic sequence
agccacgattcac

SEQ ID NO: 9973 - DNA, 13 bp, Artificial Sequence
  synthetic sequence
gccggtgcgttaa

SEQ ID NO: 9974 - DNA, 13 bp, Artificial Sequence
  synthetic sequence
agaagaccaatta

SEQ ID NO: 9975 - DNA, 13 bp, Artificial Sequence
  synthetic sequence
ggtttcaattaga

SEQ ID NO: 9976 - DNA, 13 bp, Artificial Sequence
  synthetic sequence
taatgtttgcctg

SEQ ID NO: 9977 - DNA, 13 bp, Artificial Sequence
  synthetic sequence
agagagggtactt

SEQ ID NO: 9978 - DNA, 13 bp, Artificial Sequence
  synthetic sequence
tcaactccatatt

SEQ ID NO: 9979 - DNA, 13 bp, Artificial Sequence
  synthetic sequence
ttaagtctaatgc

SEQ ID NO: 9980 - DNA, 13 bp, Artificial Sequence
  synthetic sequence
ctaacatgatcct

SEQ ID NO: 9981 - DNA, 13 bp, Artificial Sequence
  synthetic sequence
cacccttttcagt

SEQ ID NO: 9982 - DNA, 13 bp, Artificial Sequence
  synthetic sequence
ggtttacacatct

SEQ ID NO: 9983 - DNA, 13 bp, Artificial Sequence
  synthetic sequence
aagatcctacaaa

SEQ ID NO: 9984 - DNA, 13 bp, Artificial Sequence
  synthetic sequence
gttccatagcatc

SEQ ID NO: 9985 - DNA, 13 bp, Artificial Sequence
  synthetic sequence
tagcttctggtaa

SEQ ID NO: 9986 - DNA, 13 bp, Artificial Sequence
  synthetic sequence
acagtagagacca

SEQ ID NO: 9987 - DNA, 13 bp, Artificial Sequence
  synthetic sequence
gctattgatacaa

SEQ ID NO: 9988 - DNA, 13 bp, Artificial Sequence
  synthetic sequence
ctgatttgccagt

SEQ ID NO: 9989 - DNA, 13 bp, Artificial Sequence
  synthetic sequence
aagaagccataat

SEQ ID NO: 9990 - DNA, 13 bp, Artificial Sequence
  synthetic sequence
tcttaagccatga

SEQ ID NO: 9991 - DNA, 13 bp, Artificial Sequence
  synthetic sequence
ctatgcctttgta

SEQ ID NO: 9992 - DNA, 13 bp, Artificial Sequence
  synthetic sequence
tcaagtctctgag

SEQ ID NO: 9993 - DNA, 13 bp, Artificial Sequence
  synthetic sequence
acactggtgacaa

SEQ ID NO: 9994 - DNA, 13 bp, Artificial Sequence
  synthetic sequence
ctttcttttggca

SEQ ID NO: 9995 - DNA, 13 bp, Artificial Sequence
  synthetic sequence
atgtggctgtgac

SEQ ID NO: 9996 - DNA, 13 bp, Artificial Sequence
  synthetic sequence
cgtcattgtaatc

SEQ ID NO: 9997 - DNA, 13 bp, Artificial Sequence
  synthetic sequence
tgagaactgctgg

SEQ ID NO: 9998 - DNA, 13 bp, Artificial Sequence
  synthetic sequence
atacacaccccac

SEQ ID NO: 9999 - DNA, 13 bp, Artificial Sequence
  synthetic sequence
gccttggagtctg

SEQ ID NO: 10000 - DNA, 13 bp, Artificial Sequence
  synthetic sequence
ctctattgccaat

SEQ ID NO: 10001 - DNA, 13 bp, Artificial Sequence
  synthetic sequence
ttactagcatatc

SEQ ID NO: 10002 - DNA, 13 bp, Artificial Sequence
  synthetic sequence
taaactggccatt

SEQ ID NO: 10003 - DNA, 13 bp, Artificial Sequence
  synthetic sequence
tggtgcgttaata

SEQ ID NO: 10004 - DNA, 13 bp, Artificial Sequence
  synthetic sequence
gatttatcccata

SEQ ID NO: 10005 - DNA, 13 bp, Artificial Sequence
  synthetic sequence
ttcccacctacat

SEQ ID NO: 10006 - DNA, 13 bp, Artificial Sequence
  synthetic sequence
agagagggtacct

SEQ ID NO: 10007 - DNA, 13 bp, Artificial Sequence
  synthetic sequence
agcagcaatggga

SEQ ID NO: 10008 - DNA, 13 bp, Artificial Sequence
  synthetic sequence
ctaagtctatgcc

SEQ ID NO: 10009 - DNA, 13 bp, Artificial Sequence
  synthetic sequence
tttgcttccactg

SEQ ID NO: 10010 - DNA, 13 bp, Artificial Sequence
  synthetic sequence
tggagagccatgt

SEQ ID NO: 10011 - DNA, 13 bp, Artificial Sequence
  synthetic sequence
ctggatcacaacc

SEQ ID NO: 10012 - DNA, 13 bp, Artificial Sequence
  synthetic sequence
cttgcacttcctt

SEQ ID NO: 10013 - DNA, 13 bp, Artificial Sequence
  synthetic sequence
gtaagaaggccga

SEQ ID NO: 10014 - DNA, 13 bp, Artificial Sequence
  synthetic sequence
ctccctagcctct

SEQ ID NO: 10015 - DNA, 13 bp, Artificial Sequence
  synthetic sequence
cctcaattaagcg

SEQ ID NO: 10016 - DNA, 13 bp, Artificial Sequence
  synthetic sequence
aaagatctaacat

SEQ ID NO: 10017 - DNA, 13 bp, Artificial Sequence
  synthetic sequence
gtgcccatgcttt

SEQ ID NO: 10018 - DNA, 13 bp, Artificial Sequence
  synthetic sequence
caaccccatattt

SEQ ID NO: 10019 - DNA, 13 bp, Artificial Sequence
  synthetic sequence
cacctagcatggt

SEQ ID NO: 10020 - DNA, 13 bp, Artificial Sequence
  synthetic sequence
tcattactaatcc

SEQ ID NO: 10021 - DNA, 13 bp, Artificial Sequence
  synthetic sequence
atcggtatctaac

SEQ ID NO: 10022 - DNA, 13 bp, Artificial Sequence
  synthetic sequence
attccatacagac

SEQ ID NO: 10023 - DNA, 13 bp, Artificial Sequence
  synthetic sequence
aagtgatagttga

SEQ ID NO: 10024 - DNA, 13 bp, Artificial Sequence
  synthetic sequence
tagtagtagactc

SEQ ID NO: 10025 - DNA, 13 bp, Artificial Sequence
  synthetic sequence
ctgttggtgcaag

SEQ ID NO: 10026 - DNA, 13 bp, Artificial Sequence
  synthetic sequence
aagatgacacctg

SEQ ID NO: 10027 - DNA, 13 bp, Artificial Sequence
  synthetic sequence
gtagagtgtatag

SEQ ID NO: 10028 - DNA, 13 bp, Artificial Sequence
  synthetic sequence
aactgagccatca

SEQ ID NO: 10029 - DNA, 13 bp, Artificial Sequence
  synthetic sequence
ttatttgaaaagg

SEQ ID NO: 10030 - DNA, 13 bp, Artificial Sequence
  synthetic sequence
gtaacttatgatt

SEQ ID NO: 10031 - DNA, 13 bp, Artificial Sequence
  synthetic sequence
atacaaaatagta

SEQ ID NO: 10032 - DNA, 13 bp, Artificial Sequence
  synthetic sequence
atagggaaagtac

SEQ ID NO: 10033 - DNA, 13 bp, Artificial Sequence
  synthetic sequence
atattgaacaaga

SEQ ID NO: 10034 - DNA, 13 bp, Artificial Sequence
  synthetic sequence
ttatgaagaatct

SEQ ID NO: 10035 - DNA, 13 bp, Artificial Sequence
  synthetic sequence
tggatttgaatgg

SEQ ID NO: 10036 - DNA, 13 bp, Artificial Sequence
  synthetic sequence
aataatcataaaa

SEQ ID NO: 10037 - DNA, 13 bp, Artificial Sequence
  synthetic sequence
ataaatttatgat

SEQ ID NO: 10038 - DNA, 13 bp, Artificial Sequence
  synthetic sequence
atgatggatgagg

SEQ ID NO: 10039 - DNA, 13 bp, Artificial Sequence
  synthetic sequence
tctaaagagtatg

SEQ ID NO: 10040 - DNA, 13 bp, Artificial Sequence
  synthetic sequence
atgtatgttagtg

SEQ ID NO: 10041 - DNA, 13 bp, Artificial Sequence
  synthetic sequence
tcaaagtattggt

SEQ ID NO: 10042 - DNA, 13 bp, Artificial Sequence
  synthetic sequence
gaaatggtgcaat

SEQ ID NO: 10043 - DNA, 13 bp, Artificial Sequence
  synthetic sequence
tcatatggaggtg

SEQ ID NO: 10044 - DNA, 13 bp, Artificial Sequence
  synthetic sequence
cagatggctccaa

SEQ ID NO: 10045 - DNA, 13 bp, Artificial Sequence
  synthetic sequence
gattatggtctga

SEQ ID NO: 10046 - DNA, 13 bp, Artificial Sequence
  synthetic sequence
tgcacctatgctc

SEQ ID NO: 10047 - DNA, 13 bp, Artificial Sequence
  synthetic sequence
ataccagattata

SEQ ID NO: 10048 - DNA, 13 bp, Artificial Sequence
  synthetic sequence
aatttttcatttt

SEQ ID NO: 10049 - DNA, 13 bp, Artificial Sequence
  synthetic sequence
tcaccaaagaaaa

SEQ ID NO: 10050 - DNA, 13 bp, Artificial Sequence
  synthetic sequence
acatttaattttg

SEQ ID NO: 10051 - DNA, 13 bp, Artificial Sequence
  synthetic sequence
ctcaggttgcaca

SEQ ID NO: 10052 - DNA, 13 bp, Artificial Sequence
  synthetic sequence
ttcctgattcatt

SEQ ID NO: 10053 - DNA, 13 bp, Artificial Sequence
  synthetic sequence
cagcaatgaccat

SEQ ID NO: 10054 - DNA, 13 bp, Artificial Sequence
  synthetic sequence
tgtccgaggatgg

SEQ ID NO: 10055 - DNA, 13 bp, Artificial Sequence
  synthetic sequence
ctgatagatgtgt

SEQ ID NO: 10056 - DNA, 13 bp, Artificial Sequence
  synthetic sequence
tctttatgtttaa

SEQ ID NO: 10057 - DNA, 13 bp, Artificial Sequence
  synthetic sequence
ataaagggtgatt

SEQ ID NO: 10058 - DNA, 13 bp, Artificial Sequence
  synthetic sequence
caataagagatat

SEQ ID NO: 10059 - DNA, 13 bp, Artificial Sequence
  synthetic sequence
aaacaagaaatat

SEQ ID NO: 10060 - DNA, 13 bp, Artificial Sequence
  synthetic sequence
aattcaagacata

SEQ ID NO: 10061 - DNA, 13 bp, Artificial Sequence
  synthetic sequence
agatacaccagca

SEQ ID NO: 10062 - DNA, 13 bp, Artificial Sequence
  synthetic sequence
tttatcacaacac

SEQ ID NO: 10063 - DNA, 13 bp, Artificial Sequence
  synthetic sequence
tggatatatgatg

SEQ ID NO: 10064 - DNA, 13 bp, Artificial Sequence
  synthetic sequence
taagagagccagg

SEQ ID NO: 10065 - DNA, 13 bp, Artificial Sequence
  synthetic sequence
ttatacctgcagt

SEQ ID NO: 10066 - DNA, 13 bp, Artificial Sequence
  synthetic sequence
tggcagcaataga

SEQ ID NO: 10067 - DNA, 13 bp, Artificial Sequence
  synthetic sequence
agagtggttagat

SEQ ID NO: 10068 - DNA, 13 bp, Artificial Sequence
  synthetic sequence
ggatactcacaca

SEQ ID NO: 10069 - DNA, 13 bp, Artificial Sequence
  synthetic sequence
gctgagataagtt

SEQ ID NO: 10070 - DNA, 13 bp, Artificial Sequence
  synthetic sequence
gttcctttattag

SEQ ID NO: 10071 - DNA, 13 bp, Artificial Sequence
  synthetic sequence
taaaatcaatgtc

SEQ ID NO: 10072 - DNA, 13 bp, Artificial Sequence
  synthetic sequence
aacagattcaagc

SEQ ID NO: 10073 - DNA, 13 bp, Artificial Sequence
  synthetic sequence
gagaatatagata

SEQ ID NO: 10074 - DNA, 13 bp, Artificial Sequence
  synthetic sequence
aagaaaatgaggg

SEQ ID NO: 10075 - DNA, 13 bp, Artificial Sequence
  synthetic sequence
taggttattttga

SEQ ID NO: 10076 - DNA, 13 bp, Artificial Sequence
  synthetic sequence
atgagaggttagg

SEQ ID NO: 10077 - DNA, 13 bp, Artificial Sequence
  synthetic sequence
cttgacccacaca

SEQ ID NO: 10078 - DNA, 13 bp, Artificial Sequence
  synthetic sequence
ggctgcagggtaa

SEQ ID NO: 10079 - DNA, 13 bp, Artificial Sequence
  synthetic sequence
aaaacatttaatt

SEQ ID NO: 10080 - DNA, 13 bp, Artificial Sequence
  synthetic sequence
cacatcactctga

SEQ ID NO: 10081 - DNA, 13 bp, Artificial Sequence
  synthetic sequence
tctctatctgttg

SEQ ID NO: 10082 - DNA, 13 bp, Artificial Sequence
  synthetic sequence
gggtatccaaagt

SEQ ID NO: 10083 - DNA, 13 bp, Artificial Sequence
  synthetic sequence
tactaatacaatg

SEQ ID NO: 10084 - DNA, 13 bp, Artificial Sequence
  synthetic sequence
caattagatctgt

SEQ ID NO: 10085 - DNA, 13 bp, Artificial Sequence
  synthetic sequence
acttagctgccct

SEQ ID NO: 10086 - DNA, 13 bp, Artificial Sequence
  synthetic sequence
taccttcagggaa

SEQ ID NO: 10087 - DNA, 13 bp, Artificial Sequence
  synthetic sequence
aataagctaaaaa

SEQ ID NO: 10088 - DNA, 13 bp, Artificial Sequence
  synthetic sequence
cataatggactcc

SEQ ID NO: 10089 - DNA, 13 bp, Artificial Sequence
  synthetic sequence
atacagaagacca

SEQ ID NO: 10090 - DNA, 13 bp, Artificial Sequence
  synthetic sequence
attttgaaaatat

SEQ ID NO: 10091 - DNA, 13 bp, Artificial Sequence
  synthetic sequence
tgagcattgattt

SEQ ID NO: 10092 - DNA, 13 bp, Artificial Sequence
  synthetic sequence
ttgaataaagtcc

SEQ ID NO: 10093 - DNA, 13 bp, Artificial Sequence
  synthetic sequence
ctataagagtgaa

SEQ ID NO: 10094 - DNA, 13 bp, Artificial Sequence
  synthetic sequence
tagaagtttggag

SEQ ID NO: 10095 - DNA, 13 bp, Artificial Sequence
  synthetic sequence
gctattttgatga

SEQ ID NO: 10096 - DNA, 13 bp, Artificial Sequence
  synthetic sequence
ttaaataagtgtt

SEQ ID NO: 10097 - DNA, 13 bp, Artificial Sequence
  synthetic sequence
gctgcaaacagtt

SEQ ID NO: 10098 - DNA, 13 bp, Artificial Sequence
  synthetic sequence
ctttaatcacatc

SEQ ID NO: 10099 - DNA, 13 bp, Artificial Sequence
  synthetic sequence
atgatggatgaag

SEQ ID NO: 10100 - DNA, 13 bp, Artificial Sequence
  synthetic sequence
tgtcaggacaagt

SEQ ID NO: 10101 - DNA, 13 bp, Artificial Sequence
  synthetic sequence
attcagatgatgc

SEQ ID NO: 10102 - DNA, 13 bp, Artificial Sequence
  synthetic sequence
tatttgcaggggt

SEQ ID NO: 10103 - DNA, 13 bp, Artificial Sequence
  synthetic sequence
catattacatacc

SEQ ID NO: 10104 - DNA, 13 bp, Artificial Sequence
  synthetic sequence
aatcaaagaagat

SEQ ID NO: 10105 - DNA, 13 bp, Artificial Sequence
  synthetic sequence
tgacaatgcagtc

SEQ ID NO: 10106 - DNA, 13 bp, Artificial Sequence
  synthetic sequence
gttaagcatgctg

SEQ ID NO: 10107 - DNA, 13 bp, Artificial Sequence
  synthetic sequence
gttgatttaaaga

SEQ ID NO: 10108 - DNA, 13 bp, Artificial Sequence
  synthetic sequence
aattatattgata

SEQ ID NO: 10109 - DNA, 13 bp, Artificial Sequence
  synthetic sequence
ggggagagtgtgt

SEQ ID NO: 10110 - DNA, 13 bp, Artificial Sequence
  synthetic sequence
tacagtttaagca

SEQ ID NO: 10111 - DNA, 13 bp, Artificial Sequence
  synthetic sequence
tgtttaatgacct

SEQ ID NO: 10112 - DNA, 13 bp, Artificial Sequence
  synthetic sequence
catacaataaggg

SEQ ID NO: 10113 - DNA, 13 bp, Artificial Sequence
  synthetic sequence
ggtttagtgttaa

SEQ ID NO: 10114 - DNA, 13 bp, Artificial Sequence
  synthetic sequence
tttcattctttga

SEQ ID NO: 10115 - DNA, 13 bp, Artificial Sequence
  synthetic sequence
atacagccaagtt

SEQ ID NO: 10116 - DNA, 13 bp, Artificial Sequence
  synthetic sequence
acattcaattttg

SEQ ID NO: 10117 - DNA, 13 bp, Artificial Sequence
  synthetic sequence
ggttacatgatgt

SEQ ID NO: 10118 - DNA, 13 bp, Artificial Sequence
  synthetic sequence
gatagaggttttt

SEQ ID NO: 10119 - DNA, 13 bp, Artificial Sequence
  synthetic sequence
caaaatactggtc

SEQ ID NO: 10120 - DNA, 13 bp, Artificial Sequence
  synthetic sequence
aaaacattcaatt

SEQ ID NO: 10121 - DNA, 13 bp, Artificial Sequence
  synthetic sequence
gctgctaatagct

SEQ ID NO: 10122 - DNA, 13 bp, Artificial Sequence
  synthetic sequence
gatgcattattta

SEQ ID NO: 10123 - DNA, 13 bp, Artificial Sequence
  synthetic sequence
ccaatgctgaatt

SEQ ID NO: 10124 - DNA, 13 bp, Artificial Sequence
  synthetic sequence
aacattctcagaa

SEQ ID NO: 10125 - DNA, 13 bp, Artificial Sequence
  synthetic sequence
gttagagagcact

SEQ ID NO: 10126 - DNA, 13 bp, Artificial Sequence
  synthetic sequence
gacccacacatca

SEQ ID NO: 10127 - DNA, 13 bp, Artificial Sequence
  synthetic sequence
ataaagggagatt

SEQ ID NO: 10128 - DNA, 13 bp, Artificial Sequence
  synthetic sequence
attgcaccaatgc

SEQ ID NO: 10129 - DNA, 13 bp, Artificial Sequence
  synthetic sequence
aggatttagctgc

SEQ ID NO: 10130 - DNA, 13 bp, Artificial Sequence
  synthetic sequence
tacctgctgttac

SEQ ID NO: 10131 - DNA, 13 bp, Artificial Sequence
  synthetic sequence
taaatgttcatcc

SEQ ID NO: 10132 - DNA, 13 bp, Artificial Sequence
  synthetic sequence
ttattaggatgaa

SEQ ID NO: 10133 - DNA, 13 bp, Artificial Sequence
  synthetic sequence
taagaaaatgaga

SEQ ID NO: 10134 - DNA, 13 bp, Artificial Sequence
  synthetic sequence
catatgattatat

SEQ ID NO: 10135 - DNA, 13 bp, Artificial Sequence
  synthetic sequence
attcacataagag

SEQ ID NO: 10136 - DNA, 13 bp, Artificial Sequence
  synthetic sequence
ttaggttctctgt

SEQ ID NO: 10137 - DNA, 13 bp, Artificial Sequence
  synthetic sequence
catttgcactggt

SEQ ID NO: 10138 - DNA, 13 bp, Artificial Sequence
  synthetic sequence
tgttgcattatgc

SEQ ID NO: 10139 - DNA, 13 bp, Artificial Sequence
  synthetic sequence
tctaaagaatatg

SEQ ID NO: 10140 - DNA, 13 bp, Artificial Sequence
  synthetic sequence
cataaattcatga

SEQ ID NO: 10141 - DNA, 13 bp, Artificial Sequence
  synthetic sequence
ccagcatgagaga

SEQ ID NO: 10142 - DNA, 13 bp, Artificial Sequence
  synthetic sequence
ttgatgtcaaggt

SEQ ID NO: 10143 - DNA, 13 bp, Artificial Sequence
  synthetic sequence
aagatttggctgc

SEQ ID NO: 10144 - DNA, 13 bp, Artificial Sequence
  synthetic sequence
atactgaggatca

SEQ ID NO: 10145 - DNA, 13 bp, Artificial Sequence
  synthetic sequence
ttatcggaaaggt

SEQ ID NO: 10146 - DNA, 13 bp, Artificial Sequence
  synthetic sequence
ttcaaaatgaaac

SEQ ID NO: 10147 - DNA, 13 bp, Artificial Sequence
  synthetic sequence
tccagatacacct

SEQ ID NO: 10148 - DNA, 13 bp, Artificial Sequence
  synthetic sequence
tatttgaaaaagg

SEQ ID NO: 10149 - DNA, 13 bp, Artificial Sequence
  synthetic sequence
acaagagacagaa

SEQ ID NO: 10150 - DNA, 13 bp, Artificial Sequence
  synthetic sequence
aaactatatgaag

SEQ ID NO: 10151 - DNA, 13 bp, Artificial Sequence
  synthetic sequence
atatggtgttgtt

SEQ ID NO: 10152 - DNA, 13 bp, Artificial Sequence
  synthetic sequence
tggctacatgatg

SEQ ID NO: 10153 - DNA, 13 bp, Artificial Sequence
  synthetic sequence
gaaataagttatg

SEQ ID NO: 10154 - DNA, 13 bp, Artificial Sequence
  synthetic sequence
ggtgaaaagcatg

SEQ ID NO: 10155 - DNA, 13 bp, Artificial Sequence
  synthetic sequence
agttatgagtatt

SEQ ID NO: 10156 - DNA, 13 bp, Artificial Sequence
  synthetic sequence
ggaagttttggct

SEQ ID NO: 10157 - DNA, 13 bp, Artificial Sequence
  synthetic sequence
cccagtctcctta

SEQ ID NO: 10158 - DNA, 13 bp, Artificial Sequence
  synthetic sequence
acatctatgctcc

SEQ ID NO: 10159 - DNA, 13 bp, Artificial Sequence
  synthetic sequence
aacaataagttaa

SEQ ID NO: 10160 - DNA, 13 bp, Artificial Sequence
  synthetic sequence
aagtgtatatata

SEQ ID NO: 10161 - DNA, 13 bp, Artificial Sequence
  synthetic sequence
ttatcactgtttt

SEQ ID NO: 10162 - DNA, 13 bp, Artificial Sequence
  synthetic sequence
agaaatatttaat

SEQ ID NO: 10163 - DNA, 13 bp, Artificial Sequence
  synthetic sequence
catggtgaacaaa

SEQ ID NO: 10164 - DNA, 13 bp, Artificial Sequence
  synthetic sequence
gatggttcaaaca

SEQ ID NO: 10165 - DNA, 13 bp, Artificial Sequence
  synthetic sequence
tgttattccagac

SEQ ID NO: 10166 - DNA, 13 bp, Artificial Sequence
  synthetic sequence
actggttgaaatc

SEQ ID NO: 10167 - DNA, 13 bp, Artificial Sequence
  synthetic sequence
attgcacccatgc

SEQ ID NO: 10168 - DNA, 13 bp, Artificial Sequence
  synthetic sequence
taagacatgacat

SEQ ID NO: 10169 - DNA, 13 bp, Artificial Sequence
  synthetic sequence
agacacaccatgg

SEQ ID NO: 10170 - DNA, 13 bp, Artificial Sequence
  synthetic sequence
catcactgttttc

SEQ ID NO: 10171 - DNA, 13 bp, Artificial Sequence
  synthetic sequence
cccagtcttttaa

SEQ ID NO: 10172 - DNA, 13 bp, Artificial Sequence
  synthetic sequence
ctttaattacatc

SEQ ID NO: 10173 - DNA, 13 bp, Artificial Sequence
  synthetic sequence
ccatgaccatgca

SEQ ID NO: 10174 - DNA, 13 bp, Artificial Sequence
  synthetic sequence
acatctttatact

SEQ ID NO: 10175 - DNA, 13 bp, Artificial Sequence
  synthetic sequence
taaaatactctct

SEQ ID NO: 10176 - DNA, 13 bp, Artificial Sequence
  synthetic sequence
tttgaagataaaa

SEQ ID NO: 10177 - DNA, 13 bp, Artificial Sequence
  synthetic sequence
aatttcatgaaaa

SEQ ID NO: 10178 - DNA, 13 bp, Artificial Sequence
  synthetic sequence
accacagtatccc

SEQ ID NO: 10179 - DNA, 13 bp, Artificial Sequence
  synthetic sequence
acattctccaaag

SEQ ID NO: 10180 - DNA, 13 bp, Artificial Sequence
  synthetic sequence
tttattacaacac

SEQ ID NO: 10181 - DNA, 13 bp, Artificial Sequence
  synthetic sequence
aaagtattgttcg

SEQ ID NO: 10182 - DNA, 13 bp, Artificial Sequence
  synthetic sequence
tatctattataat

SEQ ID NO: 10183 - DNA, 13 bp, Artificial Sequence
  synthetic sequence
aatagggaaagtc

SEQ ID NO: 10184 - DNA, 13 bp, Artificial Sequence
  synthetic sequence
agggagaaagacc

SEQ ID NO: 10185 - DNA, 13 bp, Artificial Sequence
  synthetic sequence
tgctctttaataa

SEQ ID NO: 10186 - DNA, 13 bp, Artificial Sequence
  synthetic sequence
gattttgtagggt

SEQ ID NO: 10187 - DNA, 13 bp, Artificial Sequence
  synthetic sequence
tgatcctcatatt

SEQ ID NO: 10188 - DNA, 13 bp, Artificial Sequence
  synthetic sequence
tcattattttcat

SEQ ID NO: 10189 - DNA, 13 bp, Artificial Sequence
  synthetic sequence
caaaatagcatcc

SEQ ID NO: 10190 - DNA, 13 bp, Artificial Sequence
  synthetic sequence
ttgaaaacataga

SEQ ID NO: 10191 - DNA, 13 bp, Artificial Sequence
  synthetic sequence
atagatgtcttga

SEQ ID NO: 10192 - DNA, 13 bp, Artificial Sequence
  synthetic sequence
tttcattcttcga

SEQ ID NO: 10193 - DNA, 13 bp, Artificial Sequence
  synthetic sequence
agtaaggttgaaa

SEQ ID NO: 10194 - DNA, 13 bp, Artificial Sequence
  synthetic sequence
tgaatcccattat

SEQ ID NO: 10195 - DNA, 13 bp, Artificial Sequence
  synthetic sequence
tatttggtgttgc

SEQ ID NO: 10196 - DNA, 13 bp, Artificial Sequence
  synthetic sequence
gcaattcaagggg

SEQ ID NO: 10197 - DNA, 13 bp, Artificial Sequence
  synthetic sequence
tcataagtttatg

SEQ ID NO: 10198 - DNA, 13 bp, Artificial Sequence
  synthetic sequence
tggatcatatcta

SEQ ID NO: 10199 - DNA, 13 bp, Artificial Sequence
  synthetic sequence
aaagcctaataga

SEQ ID NO: 10200 - DNA, 13 bp, Artificial Sequence
  synthetic sequence
tttttatctgaca

SEQ ID NO: 10201 - DNA, 13 bp, Artificial Sequence
  synthetic sequence
tcatgttgtgcaa

SEQ ID NO: 10202 - DNA, 13 bp, Artificial Sequence
  synthetic sequence
tcagaccagtcat

SEQ ID NO: 10203 - DNA, 13 bp, Artificial Sequence
  synthetic sequence
ctcatcccacact

SEQ ID NO: 10204 - DNA, 13 bp, Artificial Sequence
  synthetic sequence
gtaccatataatc

SEQ ID NO: 10205 - DNA, 13 bp, Artificial Sequence
  synthetic sequence
caattcttgccat

SEQ ID NO: 10206 - DNA, 13 bp, Artificial Sequence
  synthetic sequence
ctatacgtgacat

SEQ ID NO: 10207 - DNA, 13 bp, Artificial Sequence
  synthetic sequence
gatgatttggtat

SEQ ID NO: 10208 - DNA, 13 bp, Artificial Sequence
  synthetic sequence
aattcagattttg

SEQ ID NO: 10209 - DNA, 13 bp, Artificial Sequence
  synthetic sequence
cacctgatgccca

SEQ ID NO: 10210 - DNA, 13 bp, Artificial Sequence
  synthetic sequence
gtttaagtgcatc

SEQ ID NO: 10211 - DNA, 13 bp, Artificial Sequence
  synthetic sequence
ctactatcaattt

SEQ ID NO: 10212 - DNA, 13 bp, Artificial Sequence
  synthetic sequence
aaccatacattac

SEQ ID NO: 10213 - DNA, 13 bp, Artificial Sequence
  synthetic sequence
tacccaatgacag

SEQ ID NO: 10214 - DNA, 13 bp, Artificial Sequence
  synthetic sequence
gagcctctctatc

SEQ ID NO: 10215 - DNA, 13 bp, Artificial Sequence
  synthetic sequence
aatttaagtgccc

SEQ ID NO: 10216 - DNA, 13 bp, Artificial Sequence
  synthetic sequence
tcagataacttca

SEQ ID NO: 10217 - DNA, 13 bp, Artificial Sequence
  synthetic sequence
agtattggaacca

SEQ ID NO: 10218 - DNA, 13 bp, Artificial Sequence
  synthetic sequence
tgtgctgctgcta

SEQ ID NO: 10219 - DNA, 13 bp, Artificial Sequence
  synthetic sequence
cccttgtcaacat

SEQ ID NO: 10220 - DNA, 13 bp, Artificial Sequence
  synthetic sequence
cacgtgataccca

SEQ ID NO: 10221 - DNA, 13 bp, Artificial Sequence
  synthetic sequence
tgctgcacactgg

SEQ ID NO: 10222 - DNA, 13 bp, Artificial Sequence
  synthetic sequence
cctggtgaccact

SEQ ID NO: 10223 - DNA, 13 bp, Artificial Sequence
  synthetic sequence
tcaagccttgcac

SEQ ID NO: 10224 - DNA, 13 bp, Artificial Sequence
  synthetic sequence
cacggttcatgat

SEQ ID NO: 10225 - DNA, 13 bp, Artificial Sequence
  synthetic sequence
atatgactagcaa

SEQ ID NO: 10226 - DNA, 13 bp, Artificial Sequence
  synthetic sequence
aataatgagacct

SEQ ID NO: 10227 - DNA, 13 bp, Artificial Sequence
  synthetic sequence
taacatcacagtg

SEQ ID NO: 10228 - DNA, 13 bp, Artificial Sequence
  synthetic sequence
ttatgagatgacc

SEQ ID NO: 10229 - DNA, 13 bp, Artificial Sequence
  synthetic sequence
taaacatactctt

SEQ ID NO: 10230 - DNA, 13 bp, Artificial Sequence
  synthetic sequence
catcatagtagtc

SEQ ID NO: 10231 - DNA, 13 bp, Artificial Sequence
  synthetic sequence
tcatgtgctgctt

SEQ ID NO: 10232 - DNA, 13 bp, Artificial Sequence
  synthetic sequence
aatgatttgcaaa

SEQ ID NO: 10233 - DNA, 13 bp, Artificial Sequence
  synthetic sequence
agaacttatgcaa

SEQ ID NO: 10234 - DNA, 13 bp, Artificial Sequence
  synthetic sequence
gtttcaaggcctg

SEQ ID NO: 10235 - DNA, 13 bp, Artificial Sequence
  synthetic sequence
tcccatcatctac

SEQ ID NO: 10236 - DNA, 13 bp, Artificial Sequence
  synthetic sequence
gttgtggaatatt

SEQ ID NO: 10237 - DNA, 13 bp, Artificial Sequence
  synthetic sequence
cttggctagtagc

SEQ ID NO: 10238 - DNA, 13 bp, Artificial Sequence
  synthetic sequence
aacaaatggtatt

SEQ ID NO: 10239 - DNA, 13 bp, Artificial Sequence
  synthetic sequence
tcttcatcatcat

SEQ ID NO: 10240 - DNA, 13 bp, Artificial Sequence
  synthetic sequence
catacttgatgtc

SEQ ID NO: 10241 - DNA, 13 bp, Artificial Sequence
  synthetic sequence
acacagttcttat

SEQ ID NO: 10242 - DNA, 13 bp, Artificial Sequence
  synthetic sequence
caagctcagggaa

SEQ ID NO: 10243 - DNA, 13 bp, Artificial Sequence
  synthetic sequence
atggttcttccca

SEQ ID NO: 10244 - DNA, 13 bp, Artificial Sequence
  synthetic sequence
gcttctagtgcag

SEQ ID NO: 10245 - DNA, 13 bp, Artificial Sequence
  synthetic sequence
tgacaatgattgg

SEQ ID NO: 10246 - DNA, 13 bp, Artificial Sequence
  synthetic sequence
tcctgtgtatgaa

SEQ ID NO: 10247 - DNA, 13 bp, Artificial Sequence
  synthetic sequence
tagtaattgatca

SEQ ID NO: 10248 - DNA, 13 bp, Artificial Sequence
  synthetic sequence
acctccccatggt

SEQ ID NO: 10249 - DNA, 13 bp, Artificial Sequence
  synthetic sequence
actgcttgaagga

SEQ ID NO: 10250 - DNA, 13 bp, Artificial Sequence
  synthetic sequence
acaacaccatcat

SEQ ID NO: 10251 - DNA, 13 bp, Artificial Sequence
  synthetic sequence
cacatatagcctc

SEQ ID NO: 10252 - DNA, 13 bp, Artificial Sequence
  synthetic sequence
tggccatcttcct

SEQ ID NO: 10253 - DNA, 13 bp, Artificial Sequence
  synthetic sequence
cactgagagtcac

SEQ ID NO: 10254 - DNA, 13 bp, Artificial Sequence
  synthetic sequence
gctttattatttt

SEQ ID NO: 10255 - DNA, 13 bp, Artificial Sequence
  synthetic sequence
tatatgtctgtac

SEQ ID NO: 10256 - DNA, 13 bp, Artificial Sequence
  synthetic sequence
agaataaacaata

SEQ ID NO: 10257 - DNA, 13 bp, Artificial Sequence
  synthetic sequence
tacaattgttgtt

SEQ ID NO: 10258 - DNA, 13 bp, Artificial Sequence
  synthetic sequence
aaggcctggaacc

SEQ ID NO: 10259 - DNA, 13 bp, Artificial Sequence
  synthetic sequence
cctagctcacgat

SEQ ID NO: 10260 - DNA, 13 bp, Artificial Sequence
  synthetic sequence
ttccggactaaat

SEQ ID NO: 10261 - DNA, 13 bp, Artificial Sequence
  synthetic sequence
tctatcagtgaag

SEQ ID NO: 10262 - DNA, 13 bp, Artificial Sequence
  synthetic sequence
tcttcaatatttg

SEQ ID NO: 10263 - DNA, 13 bp, Artificial Sequence
  synthetic sequence
attgtctctgccc

SEQ ID NO: 10264 - DNA, 13 bp, Artificial Sequence
  synthetic sequence
atgcatcatattg

SEQ ID NO: 10265 - DNA, 13 bp, Artificial Sequence
  synthetic sequence
aactagcctcata

SEQ ID NO: 10266 - DNA, 13 bp, Artificial Sequence
  synthetic sequence
tctttagaatagt

SEQ ID NO: 10267 - DNA, 13 bp, Artificial Sequence
  synthetic sequence
tagaatcctgtgg

SEQ ID NO: 10268 - DNA, 13 bp, Artificial Sequence
  synthetic sequence
tttgctttacacc

SEQ ID NO: 10269 - DNA, 13 bp, Artificial Sequence
  synthetic sequence
tatcttctcttgt

SEQ ID NO: 10270 - DNA, 13 bp, Artificial Sequence
  synthetic sequence
cagcattctcccg

SEQ ID NO: 10271 - DNA, 13 bp, Artificial Sequence
  synthetic sequence
aaataatatgaca

SEQ ID NO: 10272 - DNA, 13 bp, Artificial Sequence
  synthetic sequence
cttcaacatttcc

SEQ ID NO: 10273 - DNA, 13 bp, Artificial Sequence
  synthetic sequence
ctcacgataaact

SEQ ID NO: 10274 - DNA, 13 bp, Artificial Sequence
  synthetic sequence
taccttagaatag

SEQ ID NO: 10275 - DNA, 13 bp, Artificial Sequence
  synthetic sequence
gacttaaatggac

SEQ ID NO: 10276 - DNA, 13 bp, Artificial Sequence
  synthetic sequence
tcttctttacggt

SEQ ID NO: 10277 - DNA, 13 bp, Artificial Sequence
  synthetic sequence
tcagttccatcat

SEQ ID NO: 10278 - DNA, 13 bp, Artificial Sequence
  synthetic sequence
atggttcctccca

SEQ ID NO: 10279 - DNA, 13 bp, Artificial Sequence
  synthetic sequence
gaatatttggttt

SEQ ID NO: 10280 - DNA, 13 bp, Artificial Sequence
  synthetic sequence
gattcaccatcaa

SEQ ID NO: 10281 - DNA, 13 bp, Artificial Sequence
  synthetic sequence
ttacgagacatag

SEQ ID NO: 10282 - DNA, 13 bp, Artificial Sequence
  synthetic sequence
ctatatgccatgc

SEQ ID NO: 10283 - DNA, 13 bp, Artificial Sequence
  synthetic sequence
atttgagtgccca

SEQ ID NO: 10284 - DNA, 13 bp, Artificial Sequence
  synthetic sequence
ttaatgtttgaaa

SEQ ID NO: 10285 - DNA, 13 bp, Artificial Sequence
  synthetic sequence
gtcaattaatata

SEQ ID NO: 10286 - DNA, 13 bp, Artificial Sequence
  synthetic sequence
aacatgcttttcc

SEQ ID NO: 10287 - DNA, 13 bp, Artificial Sequence
  synthetic sequence
gcaatggcatcat

SEQ ID NO: 10288 - DNA, 13 bp, Artificial Sequence
  synthetic sequence
tatggctagcaat

SEQ ID NO: 10289 - DNA, 13 bp, Artificial Sequence
  synthetic sequence
aaaatgaaaaaga

SEQ ID NO: 10290 - DNA, 13 bp, Artificial Sequence
  synthetic sequence
tcatcatcaagtt

SEQ ID NO: 10291 - DNA, 13 bp, Artificial Sequence
  synthetic sequence
atctaaaaactgt

SEQ ID NO: 10292 - DNA, 13 bp, Artificial Sequence
  synthetic sequence
gatattaaactcc

SEQ ID NO: 10293 - DNA, 13 bp, Artificial Sequence
  synthetic sequence
aacataagtgtgc

SEQ ID NO: 10294 - DNA, 13 bp, Artificial Sequence
  synthetic sequence
gcctcatttgaat

SEQ ID NO: 10295 - DNA, 13 bp, Artificial Sequence
  synthetic sequence
ctgttggatgatt

SEQ ID NO: 10296 - DNA, 13 bp, Artificial Sequence
  synthetic sequence
cacgattcataat

SEQ ID NO: 10297 - DNA, 13 bp, Artificial Sequence
  synthetic sequence
caatcctagccat

SEQ ID NO: 10298 - DNA, 13 bp, Artificial Sequence
  synthetic sequence
ttaacacacctac

SEQ ID NO: 10299 - DNA, 13 bp, Artificial Sequence
  synthetic sequence
aaccaataacagc

SEQ ID NO: 10300 - DNA, 13 bp, Artificial Sequence
  synthetic sequence
cccttgataccca

SEQ ID NO: 10301 - DNA, 13 bp, Artificial Sequence
  synthetic sequence
ggtgaccatttag

SEQ ID NO: 10302 - DNA, 13 bp, Artificial Sequence
  synthetic sequence
taaatggccatct

SEQ ID NO: 10303 - DNA, 13 bp, Artificial Sequence
  synthetic sequence
cttatattgaact

SEQ ID NO: 10304 - DNA, 13 bp, Artificial Sequence
  synthetic sequence
tgtgtgcttatat

SEQ ID NO: 10305 - DNA, 13 bp, Artificial Sequence
  synthetic sequence
cagttaaatcata

SEQ ID NO: 10306 - DNA, 13 bp, Artificial Sequence
  synthetic sequence
aagtgatttgcaa

SEQ ID NO: 10307 - DNA, 13 bp, Artificial Sequence
  synthetic sequence
ggtaatgatatat

SEQ ID NO: 10308 - DNA, 13 bp, Artificial Sequence
  synthetic sequence
tgacatcacaatg

SEQ ID NO: 10309 - DNA, 13 bp, Artificial Sequence
  synthetic sequence
ctgcatactttca

SEQ ID NO: 10310 - DNA, 13 bp, Artificial Sequence
  synthetic sequence
acagccttcaaaa

SEQ ID NO: 10311 - DNA, 13 bp, Artificial Sequence
  synthetic sequence
tgctgttcagcca

SEQ ID NO: 10312 - DNA, 13 bp, Artificial Sequence
  synthetic sequence
gctgttgcaatta

SEQ ID NO: 10313 - DNA, 13 bp, Artificial Sequence
  synthetic sequence
aggttcttcccag

SEQ ID NO: 10314 - DNA, 13 bp, Artificial Sequence
  synthetic sequence
cattatttgcctt

SEQ ID NO: 10315 - DNA, 13 bp, Artificial Sequence
  synthetic sequence
agctttctcctga

SEQ ID NO: 10316 - DNA, 13 bp, Artificial Sequence
  synthetic sequence
atgcttgatgtta

SEQ ID NO: 10317 - DNA, 13 bp, Artificial Sequence
  synthetic sequence
actcgatgtcaac

SEQ ID NO: 10318 - DNA, 13 bp, Artificial Sequence
  synthetic sequence
tctcctcagataa

SEQ ID NO: 10319 - DNA, 13 bp, Artificial Sequence
  synthetic sequence
aaccatacattgc

SEQ ID NO: 10320 - DNA, 13 bp, Artificial Sequence
  synthetic sequence
atacctgtttaaa

SEQ ID NO: 10321 - DNA, 13 bp, Artificial Sequence
  synthetic sequence
tcataatagtctt

SEQ ID NO: 10322 - DNA, 13 bp, Artificial Sequence
  synthetic sequence
aatagatctcctg

SEQ ID NO: 10323 - DNA, 13 bp, Artificial Sequence
  synthetic sequence
actgaatttctgg

SEQ ID NO: 10324 - DNA, 13 bp, Artificial Sequence
  synthetic sequence
cccaaaatatctc

SEQ ID NO: 10325 - DNA, 13 bp, Artificial Sequence
  synthetic sequence
aacaaatccccag

SEQ ID NO: 10326 - DNA, 13 bp, Artificial Sequence
  synthetic sequence
tcaacataagtat

SEQ ID NO: 10327 - DNA, 13 bp, Artificial Sequence
  synthetic sequence
tcaacatcagcag

SEQ ID NO: 10328 - DNA, 13 bp, Artificial Sequence
  synthetic sequence
atgtccatcagga

SEQ ID NO: 10329 - DNA, 13 bp, Artificial Sequence
  synthetic sequence
ttgttattttgtg

SEQ ID NO: 10330 - DNA, 13 bp, Artificial Sequence
  synthetic sequence
aagaatttgtgta

SEQ ID NO: 10331 - DNA, 13 bp, Artificial Sequence
  synthetic sequence
actttcatgtgtt

SEQ ID NO: 10332 - DNA, 13 bp, Artificial Sequence
  synthetic sequence
cagaccaatcatg

SEQ ID NO: 10333 - DNA, 13 bp, Artificial Sequence
  synthetic sequence
gctcgcctgctat

SEQ ID NO: 10334 - DNA, 13 bp, Artificial Sequence
  synthetic sequence
tcaggacatatcc

SEQ ID NO: 10335 - DNA, 13 bp, Artificial Sequence
  synthetic sequence
ctcaaacaacttc

SEQ ID NO: 10336 - DNA, 13 bp, Artificial Sequence
  synthetic sequence
ttgtgtataaacc

SEQ ID NO: 10337 - DNA, 13 bp, Artificial Sequence
  synthetic sequence
cctgctctgtatt

SEQ ID NO: 10338 - DNA, 13 bp, Artificial Sequence
  synthetic sequence
tgcaaggcctgat

SEQ ID NO: 10339 - DNA, 13 bp, Artificial Sequence
  synthetic sequence
ctttgagtaatca

SEQ ID NO: 10340 - DNA, 13 bp, Artificial Sequence
  synthetic sequence
tcaggaaataaat

SEQ ID NO: 10341 - DNA, 13 bp, Artificial Sequence
  synthetic sequence
tgttcatggagat

SEQ ID NO: 10342 - DNA, 13 bp, Artificial Sequence
  synthetic sequence
atctggaaagaaa

SEQ ID NO: 10343 - DNA, 13 bp, Artificial Sequence
  synthetic sequence
gactatcttcatc

SEQ ID NO: 10344 - DNA, 13 bp, Artificial Sequence
  synthetic sequence
agctgttgctaac

SEQ ID NO: 10345 - DNA, 13 bp, Artificial Sequence
  synthetic sequence
tacaaggaatatt

SEQ ID NO: 10346 - DNA, 13 bp, Artificial Sequence
  synthetic sequence
tgacagatgaaga

SEQ ID NO: 10347 - DNA, 13 bp, Artificial Sequence
  synthetic sequence
ttgtctcaagacc

SEQ ID NO: 10348 - DNA, 13 bp, Artificial Sequence
  synthetic sequence
aagaactttcatc

SEQ ID NO: 10349 - DNA, 13 bp, Artificial Sequence
  synthetic sequence
aagaagtctgtct

SEQ ID NO: 10350 - DNA, 13 bp, Artificial Sequence
  synthetic sequence
gtgaaaattttcc

SEQ ID NO: 10351 - DNA, 13 bp, Artificial Sequence
  synthetic sequence
gtttcaagaccag

SEQ ID NO: 10352 - DNA, 13 bp, Artificial Sequence
  synthetic sequence
ataacatcacaat

SEQ ID NO: 10353 - DNA, 13 bp, Artificial Sequence
  synthetic sequence
gatagcttcaata

SEQ ID NO: 10354 - DNA, 13 bp, Artificial Sequence
  synthetic sequence
caaatttataacc

SEQ ID NO: 10355 - DNA, 13 bp, Artificial Sequence
  synthetic sequence
ccccttatcaaca

SEQ ID NO: 10356 - DNA, 13 bp, Artificial Sequence
  synthetic sequence
gattttgatggga

SEQ ID NO: 10357 - DNA, 13 bp, Artificial Sequence
  synthetic sequence
atctaaggcttta

SEQ ID NO: 10358 - DNA, 13 bp, Artificial Sequence
  synthetic sequence
tcaaattcagact

SEQ ID NO: 10359 - DNA, 13 bp, Artificial Sequence
  synthetic sequence
attgagacagcac

SEQ ID NO: 10360 - DNA, 13 bp, Artificial Sequence
  synthetic sequence
aaaaagtctgtct

SEQ ID NO: 10361 - DNA, 13 bp, Artificial Sequence
  synthetic sequence
tcaccctttagaa

SEQ ID NO: 10362 - DNA, 13 bp, Artificial Sequence
  synthetic sequence
gctttattattct

SEQ ID NO: 10363 - DNA, 13 bp, Artificial Sequence
  synthetic sequence
taactaagtaaat

SEQ ID NO: 10364 - DNA, 13 bp, Artificial Sequence
  synthetic sequence
gtttgcacacagt

SEQ ID NO: 10365 - DNA, 13 bp, Artificial Sequence
  synthetic sequence
atcaatgggtggg

SEQ ID NO: 10366 - DNA, 13 bp, Artificial Sequence
  synthetic sequence
caactaagtcctc

SEQ ID NO: 10367 - DNA, 13 bp, Artificial Sequence
  synthetic sequence
catacctggtgct

SEQ ID NO: 10368 - DNA, 13 bp, Artificial Sequence
  synthetic sequence
tctattaatgaag

SEQ ID NO: 10369 - DNA, 13 bp, Artificial Sequence
  synthetic sequence
ctcatcccacacc

SEQ ID NO: 10370 - DNA, 13 bp, Artificial Sequence
  synthetic sequence
acgattcatgatc

SEQ ID NO: 10371 - DNA, 13 bp, Artificial Sequence
  synthetic sequence
ccaatatatatgc

SEQ ID NO: 10372 - DNA, 13 bp, Artificial Sequence
  synthetic sequence
caatgccttttca

SEQ ID NO: 10373 - DNA, 13 bp, Artificial Sequence
  synthetic sequence
atggaagaataaa

SEQ ID NO: 10374 - DNA, 13 bp, Artificial Sequence
  synthetic sequence
attatcaacatat

SEQ ID NO: 10375 - DNA, 13 bp, Artificial Sequence
  synthetic sequence
gtctaaattatcc

SEQ ID NO: 10376 - DNA, 13 bp, Artificial Sequence
  synthetic sequence
aaagacgtccaga

SEQ ID NO: 10377 - DNA, 13 bp, Artificial Sequence
  synthetic sequence
tcagctaggaatg

SEQ ID NO: 10378 - DNA, 13 bp, Artificial Sequence
  synthetic sequence
ctgctaaaggaag

SEQ ID NO: 10379 - DNA, 13 bp, Artificial Sequence
  synthetic sequence
gatcaaatctcag

SEQ ID NO: 10380 - DNA, 13 bp, Artificial Sequence
  synthetic sequence
gaaagtattatca

SEQ ID NO: 10381 - DNA, 13 bp, Artificial Sequence
  synthetic sequence
ttttaatcgggaa

SEQ ID NO: 10382 - DNA, 13 bp, Artificial Sequence
  synthetic sequence
caatcactggccg

SEQ ID NO: 10383 - DNA, 13 bp, Artificial Sequence
  synthetic sequence
aaggctaatcaga

SEQ ID NO: 10384 - DNA, 13 bp, Artificial Sequence
  synthetic sequence
aatttggagtaga

SEQ ID NO: 10385 - DNA, 13 bp, Artificial Sequence
  synthetic sequence
gacaaaactagag

SEQ ID NO: 10386 - DNA, 13 bp, Artificial Sequence
  synthetic sequence
cccaaaccttgaa

SEQ ID NO: 10387 - DNA, 13 bp, Artificial Sequence
  synthetic sequence
gcatctggtgttc

SEQ ID NO: 10388 - DNA, 13 bp, Artificial Sequence
  synthetic sequence
aagtcagcatgca

SEQ ID NO: 10389 - DNA, 13 bp, Artificial Sequence
  synthetic sequence
ccttgggaatgtg

SEQ ID NO: 10390 - DNA, 13 bp, Artificial Sequence
  synthetic sequence
cacgctttttgac

SEQ ID NO: 10391 - DNA, 13 bp, Artificial Sequence
  synthetic sequence
atggatgctgagg

SEQ ID NO: 10392 - DNA, 13 bp, Artificial Sequence
  synthetic sequence
tctcagaagcata

SEQ ID NO: 10393 - DNA, 13 bp, Artificial Sequence
  synthetic sequence
tagagaatcatgg

SEQ ID NO: 10394 - DNA, 13 bp, Artificial Sequence
  synthetic sequence
tggcccttacact

SEQ ID NO: 10395 - DNA, 13 bp, Artificial Sequence
  synthetic sequence
tgaagagatcacg

SEQ ID NO: 10396 - DNA, 13 bp, Artificial Sequence
  synthetic sequence
caacattaagagg

SEQ ID NO: 10397 - DNA, 13 bp, Artificial Sequence
  synthetic sequence
agtgctttgaagc

SEQ ID NO: 10398 - DNA, 13 bp, Artificial Sequence
  synthetic sequence
caactgggtttct

SEQ ID NO: 10399 - DNA, 13 bp, Artificial Sequence
  synthetic sequence
cagcttcaagggt

SEQ ID NO: 10400 - DNA, 13 bp, Artificial Sequence
  synthetic sequence
cagaattcaaaag

SEQ ID NO: 10401 - DNA, 13 bp, Artificial Sequence
  synthetic sequence
ttactctcacgag

SEQ ID NO: 10402 - DNA, 13 bp, Artificial Sequence
  synthetic sequence
ccaaatctctgag

SEQ ID NO: 10403 - DNA, 13 bp, Artificial Sequence
  synthetic sequence
gaggctgcctatc

SEQ ID NO: 10404 - DNA, 13 bp, Artificial Sequence
  synthetic sequence
ctgtccatcctcc

SEQ ID NO: 10405 - DNA, 13 bp, Artificial Sequence
  synthetic sequence
acttgctggactt

SEQ ID NO: 10406 - DNA, 13 bp, Artificial Sequence
  synthetic sequence
tgtttttgtttag

SEQ ID NO: 10407 - DNA, 13 bp, Artificial Sequence
  synthetic sequence
atgcaatctgata

SEQ ID NO: 10408 - DNA, 13 bp, Artificial Sequence
  synthetic sequence
tccaagagtatga

SEQ ID NO: 10409 - DNA, 13 bp, Artificial Sequence
  synthetic sequence
ccaggagcctgtg

SEQ ID NO: 10410 - DNA, 13 bp, Artificial Sequence
  synthetic sequence
taaataccttatt

SEQ ID NO: 10411 - DNA, 13 bp, Artificial Sequence
  synthetic sequence
gaaaaagagcaag

SEQ ID NO: 10412 - DNA, 13 bp, Artificial Sequence
  synthetic sequence
gaagtcagaacaa

SEQ ID NO: 10413 - DNA, 13 bp, Artificial Sequence
  synthetic sequence
ttgcacatgtgga

SEQ ID NO: 10414 - DNA, 13 bp, Artificial Sequence
  synthetic sequence
agcaggggttgct

SEQ ID NO: 10415 - DNA, 13 bp, Artificial Sequence
  synthetic sequence
gctgcttgtcatg

SEQ ID NO: 10416 - DNA, 13 bp, Artificial Sequence
  synthetic sequence
atgctgattgagg

SEQ ID NO: 10417 - DNA, 13 bp, Artificial Sequence
  synthetic sequence
aagagaaacttca

SEQ ID NO: 10418 - DNA, 13 bp, Artificial Sequence
  synthetic sequence
tttggttcatgat

SEQ ID NO: 10419 - DNA, 13 bp, Artificial Sequence
  synthetic sequence
tctctctaacata

SEQ ID NO: 10420 - DNA, 13 bp, Artificial Sequence
  synthetic sequence
ctgggtagtgaag

SEQ ID NO: 10421 - DNA, 13 bp, Artificial Sequence
  synthetic sequence
tgtgatgacatta

SEQ ID NO: 10422 - DNA, 13 bp, Artificial Sequence
  synthetic sequence
aagccagcctcag

SEQ ID NO: 10423 - DNA, 13 bp, Artificial Sequence
  synthetic sequence
catggaaggctgt

SEQ ID NO: 10424 - DNA, 13 bp, Artificial Sequence
  synthetic sequence
cacaaaccttggc

SEQ ID NO: 10425 - DNA, 13 bp, Artificial Sequence
  synthetic sequence
ttcagtaagcccc

SEQ ID NO: 10426 - DNA, 13 bp, Artificial Sequence
  synthetic sequence
ttgaaagaaacat

SEQ ID NO: 10427 - DNA, 13 bp, Artificial Sequence
  synthetic sequence
ctacatatctcca

SEQ ID NO: 10428 - DNA, 13 bp, Artificial Sequence
  synthetic sequence
attaagccactct

SEQ ID NO: 10429 - DNA, 13 bp, Artificial Sequence
  synthetic sequence
gaggatagatgaa

SEQ ID NO: 10430 - DNA, 13 bp, Artificial Sequence
  synthetic sequence
ggtttcattttgg

SEQ ID NO: 10431 - DNA, 13 bp, Artificial Sequence
  synthetic sequence
acacccctaaggc

SEQ ID NO: 10432 - DNA, 13 bp, Artificial Sequence
  synthetic sequence
cctgctcagagct

SEQ ID NO: 10433 - DNA, 13 bp, Artificial Sequence
  synthetic sequence
atagatggtgatg

SEQ ID NO: 10434 - DNA, 13 bp, Artificial Sequence
  synthetic sequence
aaggcatattttt

SEQ ID NO: 10435 - DNA, 13 bp, Artificial Sequence
  synthetic sequence
tcctacctatgga

SEQ ID NO: 10436 - DNA, 13 bp, Artificial Sequence
  synthetic sequence
ccagcttcagcaa

SEQ ID NO: 10437 - DNA, 13 bp, Artificial Sequence
  synthetic sequence
cgagctaaatgcc

SEQ ID NO: 10438 - DNA, 13 bp, Artificial Sequence
  synthetic sequence
ggttcatgccagc

SEQ ID NO: 10439 - DNA, 13 bp, Artificial Sequence
  synthetic sequence
aagaccgtccaga

SEQ ID NO: 10440 - DNA, 13 bp, Artificial Sequence
  synthetic sequence
ccacatttctgca

SEQ ID NO: 10441 - DNA, 13 bp, Artificial Sequence
  synthetic sequence
ccttgaaaatgtt

SEQ ID NO: 10442 - DNA, 13 bp, Artificial Sequence
  synthetic sequence
tttagatagtgct

SEQ ID NO: 10443 - DNA, 13 bp, Artificial Sequence
  synthetic sequence
tgagtatagcaag

SEQ ID NO: 10444 - DNA, 13 bp, Artificial Sequence
  synthetic sequence
tgatttgtcttcc

SEQ ID NO: 10445 - DNA, 13 bp, Artificial Sequence
  synthetic sequence
ctctgtagctaag

SEQ ID NO: 10446 - DNA, 13 bp, Artificial Sequence
  synthetic sequence
ctccctctcttat

SEQ ID NO: 10447 - DNA, 13 bp, Artificial Sequence
  synthetic sequence
cttctaacttttc

SEQ ID NO: 10448 - DNA, 13 bp, Artificial Sequence
  synthetic sequence
gcactttttctgc

SEQ ID NO: 10449 - DNA, 13 bp, Artificial Sequence
  synthetic sequence
tcccccttggttt

SEQ ID NO: 10450 - DNA, 13 bp, Artificial Sequence
  synthetic sequence
ccatctagtcttg

SEQ ID NO: 10451 - DNA, 13 bp, Artificial Sequence
  synthetic sequence
cttcaagacattg

SEQ ID NO: 10452 - DNA, 13 bp, Artificial Sequence
  synthetic sequence
taagaagacctca

SEQ ID NO: 10453 - DNA, 13 bp, Artificial Sequence
  synthetic sequence
aacaacaggttga

SEQ ID NO: 10454 - DNA, 13 bp, Artificial Sequence
  synthetic sequence
atcaaatagcctg

SEQ ID NO: 10455 - DNA, 13 bp, Artificial Sequence
  synthetic sequence
ttgtagccaatgc

SEQ ID NO: 10456 - DNA, 13 bp, Artificial Sequence
  synthetic sequence
ccttgattcctct

SEQ ID NO: 10457 - DNA, 13 bp, Artificial Sequence
  synthetic sequence
cttcctccaggat

SEQ ID NO: 10458 - DNA, 13 bp, Artificial Sequence
  synthetic sequence
tgtgatgctgagt

SEQ ID NO: 10459 - DNA, 13 bp, Artificial Sequence
  synthetic sequence
tcttctttgtttt

SEQ ID NO: 10460 - DNA, 13 bp, Artificial Sequence
  synthetic sequence
ttccctcaggcct

SEQ ID NO: 10461 - DNA, 13 bp, Artificial Sequence
  synthetic sequence
gaaagcttcccat

SEQ ID NO: 10462 - DNA, 13 bp, Artificial Sequence
  synthetic sequence
actgatggcgatc

SEQ ID NO: 10463 - DNA, 13 bp, Artificial Sequence
  synthetic sequence
atgttcgagacat

SEQ ID NO: 10464 - DNA, 13 bp, Artificial Sequence
  synthetic sequence
cttagtcagtcca

SEQ ID NO: 10465 - DNA, 13 bp, Artificial Sequence
  synthetic sequence
ccttgtaatgaaa

SEQ ID NO: 10466 - DNA, 13 bp, Artificial Sequence
  synthetic sequence
gactaaatgcttg

SEQ ID NO: 10467 - DNA, 13 bp, Artificial Sequence
  synthetic sequence
gcctcatattcct

SEQ ID NO: 10468 - DNA, 13 bp, Artificial Sequence
  synthetic sequence
tatgggccatggt

SEQ ID NO: 10469 - DNA, 13 bp, Artificial Sequence
  synthetic sequence
aaggttgaatcta

SEQ ID NO: 10470 - DNA, 13 bp, Artificial Sequence
  synthetic sequence
gggttagctattg

SEQ ID NO: 10471 - DNA, 13 bp, Artificial Sequence
  synthetic sequence
atcttcttgcacc

SEQ ID NO: 10472 - DNA, 13 bp, Artificial Sequence
  synthetic sequence
atgcaggatccct

SEQ ID NO: 10473 - DNA, 13 bp, Artificial Sequence
  synthetic sequence
ccaatgttttcaa

SEQ ID NO: 10474 - DNA, 13 bp, Artificial Sequence
  synthetic sequence
gaccctcctctct

SEQ ID NO: 10475 - DNA, 13 bp, Artificial Sequence
  synthetic sequence
gtgcaaaatattg

SEQ ID NO: 10476 - DNA, 13 bp, Artificial Sequence
  synthetic sequence
tcctgagctaagc

SEQ ID NO: 10477 - DNA, 13 bp, Artificial Sequence
  synthetic sequence
ccagtccttggga

SEQ ID NO: 10478 - DNA, 13 bp, Artificial Sequence
  synthetic sequence
ccgcatcaattgt

SEQ ID NO: 10479 - DNA, 13 bp, Artificial Sequence
  synthetic sequence
ctattagttcagc

SEQ ID NO: 10480 - DNA, 13 bp, Artificial Sequence
  synthetic sequence
atttgaagagttg

SEQ ID NO: 10481 - DNA, 13 bp, Artificial Sequence
  synthetic sequence
caagcagagcccg

SEQ ID NO: 10482 - DNA, 13 bp, Artificial Sequence
  synthetic sequence
atcttctgagcat

SEQ ID NO: 10483 - DNA, 13 bp, Artificial Sequence
  synthetic sequence
gatgacttagtgg

SEQ ID NO: 10484 - DNA, 13 bp, Artificial Sequence
  synthetic sequence
ccacttctgctgc

SEQ ID NO: 10485 - DNA, 13 bp, Artificial Sequence
  synthetic sequence
ttcagcttcatct

SEQ ID NO: 10486 - DNA, 13 bp, Artificial Sequence
  synthetic sequence
ccacaatggggaa

SEQ ID NO: 10487 - DNA, 13 bp, Artificial Sequence
  synthetic sequence
tgcaatgaccccg

SEQ ID NO: 10488 - DNA, 13 bp, Artificial Sequence
  synthetic sequence
cccagctaagtct

SEQ ID NO: 10489 - DNA, 13 bp, Artificial Sequence
  synthetic sequence
gaagcaatgtctt

SEQ ID NO: 10490 - DNA, 13 bp, Artificial Sequence
  synthetic sequence
aacatctatagct

SEQ ID NO: 10491 - DNA, 13 bp, Artificial Sequence
  synthetic sequence
ccctcaaccctct

SEQ ID NO: 10492 - DNA, 13 bp, Artificial Sequence
  synthetic sequence
ctgtgagcgcagt

SEQ ID NO: 10493 - DNA, 13 bp, Artificial Sequence
  synthetic sequence
tccattaatttta

SEQ ID NO: 10494 - DNA, 13 bp, Artificial Sequence
  synthetic sequence
gctccttgctgct

SEQ ID NO: 10495 - DNA, 13 bp, Artificial Sequence
  synthetic sequence
gtcacggtatttt

SEQ ID NO: 10496 - DNA, 13 bp, Artificial Sequence
  synthetic sequence
tctccttctcaag

SEQ ID NO: 10497 - DNA, 13 bp, Artificial Sequence
  synthetic sequence
ttgagttgagcat

SEQ ID NO: 10498 - DNA, 13 bp, Artificial Sequence
  synthetic sequence
tgtttctttatga

SEQ ID NO: 10499 - DNA, 13 bp, Artificial Sequence
  synthetic sequence
tgctagtgtctcc

SEQ ID NO: 10500 - DNA, 13 bp, Artificial Sequence
  synthetic sequence
gacttcttgacag

SEQ ID NO: 10501 - DNA, 13 bp, Artificial Sequence
  synthetic sequence
ttggtttaacccc

SEQ ID NO: 10502 - DNA, 13 bp, Artificial Sequence
  synthetic sequence
ctcttggaagtcc

SEQ ID NO: 10503 - DNA, 13 bp, Artificial Sequence
  synthetic sequence
gattggtcagatt

SEQ ID NO: 10504 - DNA, 13 bp, Artificial Sequence
  synthetic sequence
gaatgtgtggtgg

SEQ ID NO: 10505 - DNA, 13 bp, Artificial Sequence
  synthetic sequence
aaaccattcaacg

SEQ ID NO: 10506 - DNA, 13 bp, Artificial Sequence
  synthetic sequence
ttcacgctttctg

SEQ ID NO: 10507 - DNA, 13 bp, Artificial Sequence
  synthetic sequence
taggctaatactt

SEQ ID NO: 10508 - DNA, 13 bp, Artificial Sequence
  synthetic sequence
aggagtctaaatt

SEQ ID NO: 10509 - DNA, 13 bp, Artificial Sequence
  synthetic sequence
gaggtactcaggg

SEQ ID NO: 10510 - DNA, 13 bp, Artificial Sequence
  synthetic sequence
tttggccttaaat

SEQ ID NO: 10511 - DNA, 13 bp, Artificial Sequence
  synthetic sequence
ttggagatgattc

SEQ ID NO: 10512 - DNA, 13 bp, Artificial Sequence
  synthetic sequence
atgatggaaaatt

SEQ ID NO: 10513 - DNA, 13 bp, Artificial Sequence
  synthetic sequence
catttgtgacctt

SEQ ID NO: 10514 - DNA, 13 bp, Artificial Sequence
  synthetic sequence
cctgcttcatttt

SEQ ID NO: 10515 - DNA, 13 bp, Artificial Sequence
  synthetic sequence
aaaacgcttttta

SEQ ID NO: 10516 - DNA, 13 bp, Artificial Sequence
  synthetic sequence
tgatccaatggct

SEQ ID NO: 10517 - DNA, 13 bp, Artificial Sequence
  synthetic sequence
atccaaagaaaat

SEQ ID NO: 10518 - DNA, 13 bp, Artificial Sequence
  synthetic sequence
caggtgttgctat

SEQ ID NO: 10519 - DNA, 13 bp, Artificial Sequence
  synthetic sequence
ttcaaattggtca

SEQ ID NO: 10520 - DNA, 13 bp, Artificial Sequence
  synthetic sequence
cagattgcaaatt

SEQ ID NO: 10521 - DNA, 13 bp, Artificial Sequence
  synthetic sequence
aatcttcagttca

SEQ ID NO: 10522 - DNA, 13 bp, Artificial Sequence
  synthetic sequence
ttagcaaagaaag

SEQ ID NO: 10523 - DNA, 13 bp, Artificial Sequence
  synthetic sequence
aatcaaaaacaag

SEQ ID NO: 10524 - DNA, 13 bp, Artificial Sequence
  synthetic sequence
actacacatgctc

SEQ ID NO: 10525 - DNA, 13 bp, Artificial Sequence
  synthetic sequence
gaccacatcctgt

SEQ ID NO: 10526 - DNA, 13 bp, Artificial Sequence
  synthetic sequence
ccatggtattctt

SEQ ID NO: 10527 - DNA, 13 bp, Artificial Sequence
  synthetic sequence
gagagtcatatag

SEQ ID NO: 10528 - DNA, 13 bp, Artificial Sequence
  synthetic sequence
actcaagaaatgt

SEQ ID NO: 10529 - DNA, 13 bp, Artificial Sequence
  synthetic sequence
ttgttcagtcctg

SEQ ID NO: 10530 - DNA, 13 bp, Artificial Sequence
  synthetic sequence
acaagtgggttgc

SEQ ID NO: 10531 - DNA, 13 bp, Artificial Sequence
  synthetic sequence
ataaaggttccat

SEQ ID NO: 10532 - DNA, 13 bp, Artificial Sequence
  synthetic sequence
attctattgctgg

SEQ ID NO: 10533 - DNA, 13 bp, Artificial Sequence
  synthetic sequence
tggttcctggtga

SEQ ID NO: 10534 - DNA, 13 bp, Artificial Sequence
  synthetic sequence
gtgagccagttgt

SEQ ID NO: 10535 - DNA, 13 bp, Artificial Sequence
  synthetic sequence
ttgatgctagtct

SEQ ID NO: 10536 - DNA, 13 bp, Artificial Sequence
  synthetic sequence
tggagttgtggtc

SEQ ID NO: 10537 - DNA, 13 bp, Artificial Sequence
  synthetic sequence
tattatgtgtttt

SEQ ID NO: 10538 - DNA, 13 bp, Artificial Sequence
  synthetic sequence
tatgcaagatttg

SEQ ID NO: 10539 - DNA, 13 bp, Artificial Sequence
  synthetic sequence
gatttcgtgttcc

SEQ ID NO: 10540 - DNA, 13 bp, Artificial Sequence
  synthetic sequence
tcatttgtcacct

SEQ ID NO: 10541 - DNA, 13 bp, Artificial Sequence
  synthetic sequence
taatggatggaca

SEQ ID NO: 10542 - DNA, 13 bp, Artificial Sequence
  synthetic sequence
tctcagtcaactt

SEQ ID NO: 10543 - DNA, 13 bp, Artificial Sequence
  synthetic sequence
tttagagatatta

SEQ ID NO: 10544 - DNA, 13 bp, Artificial Sequence
  synthetic sequence
aaataataaagag

SEQ ID NO: 10545 - DNA, 13 bp, Artificial Sequence
  synthetic sequence
gaaatgaatttag

SEQ ID NO: 10546 - DNA, 13 bp, Artificial Sequence
  synthetic sequence
actcagttagttg

SEQ ID NO: 10547 - DNA, 13 bp, Artificial Sequence
  synthetic sequence
atgttgttattca

SEQ ID NO: 10548 - DNA, 13 bp, Artificial Sequence
  synthetic sequence
aaagagatttaat

SEQ ID NO: 10549 - DNA, 13 bp, Artificial Sequence
  synthetic sequence
ggcaagaagaagg

SEQ ID NO: 10550 - DNA, 13 bp, Artificial Sequence
  synthetic sequence
tcttatcaatact

SEQ ID NO: 10551 - DNA, 13 bp, Artificial Sequence
  synthetic sequence
gcattttgcaaat

SEQ ID NO: 10552 - DNA, 13 bp, Artificial Sequence
  synthetic sequence
taatttctgaggg

SEQ ID NO: 10553 - DNA, 13 bp, Artificial Sequence
  synthetic sequence
atgaattatgcag

SEQ ID NO: 10554 - DNA, 13 bp, Artificial Sequence
  synthetic sequence
ttgtcaaatgaag

SEQ ID NO: 10555 - DNA, 13 bp, Artificial Sequence
  synthetic sequence
ttaagagtggaat

SEQ ID NO: 10556 - DNA, 13 bp, Artificial Sequence
  synthetic sequence
gttcactccagta

SEQ ID NO: 10557 - DNA, 13 bp, Artificial Sequence
  synthetic sequence
acaatttggtctt

SEQ ID NO: 10558 - DNA, 13 bp, Artificial Sequence
  synthetic sequence
ataacaaccatga

SEQ ID NO: 10559 - DNA, 13 bp, Artificial Sequence
  synthetic sequence
tatggtgttgaac

SEQ ID NO: 10560 - DNA, 13 bp, Artificial Sequence
  synthetic sequence
agatgttactgga

SEQ ID NO: 10561 - DNA, 13 bp, Artificial Sequence
  synthetic sequence
tgacttctccttc

SEQ ID NO: 10562 - DNA, 13 bp, Artificial Sequence
  synthetic sequence
agattgaatgatg

SEQ ID NO: 10563 - DNA, 13 bp, Artificial Sequence
  synthetic sequence
taccttctcatgc

SEQ ID NO: 10564 - DNA, 13 bp, Artificial Sequence
  synthetic sequence
agagctccattaa

SEQ ID NO: 10565 - DNA, 13 bp, Artificial Sequence
  synthetic sequence
atgttcaaattga

SEQ ID NO: 10566 - DNA, 13 bp, Artificial Sequence
  synthetic sequence
tcttggagaggag

SEQ ID NO: 10567 - DNA, 13 bp, Artificial Sequence
  synthetic sequence
acaaatattggtc

SEQ ID NO: 10568 - DNA, 13 bp, Artificial Sequence
  synthetic sequence
attggaacaggaa

SEQ ID NO: 10569 - DNA, 13 bp, Artificial Sequence
  synthetic sequence
agttgtatagagg

SEQ ID NO: 10570 - DNA, 13 bp, Artificial Sequence
  synthetic sequence
actcattttacta

SEQ ID NO: 10571 - DNA, 13 bp, Artificial Sequence
  synthetic sequence
aaaatgtgcctca

SEQ ID NO: 10572 - DNA, 13 bp, Artificial Sequence
  synthetic sequence
tgagaactcagag

SEQ ID NO: 10573 - DNA, 13 bp, Artificial Sequence
  synthetic sequence
cattaaggtggtt

SEQ ID NO: 10574 - DNA, 13 bp, Artificial Sequence
  synthetic sequence
caaggtggtggaa

SEQ ID NO: 10575 - DNA, 13 bp, Artificial Sequence
  synthetic sequence
tggttaagagata

SEQ ID NO: 10576 - DNA, 13 bp, Artificial Sequence
  synthetic sequence
ttttccacatgga

SEQ ID NO: 10577 - DNA, 13 bp, Artificial Sequence
  synthetic sequence
tattttcccagag

SEQ ID NO: 10578 - DNA, 13 bp, Artificial Sequence
  synthetic sequence
tttcctggagagg

SEQ ID NO: 10579 - DNA, 13 bp, Artificial Sequence
  synthetic sequence
tagatgtttctgg

SEQ ID NO: 10580 - DNA, 13 bp, Artificial Sequence
  synthetic sequence
cttatacttcact

SEQ ID NO: 10581 - DNA, 13 bp, Artificial Sequence
  synthetic sequence
aatgtacctcagc

SEQ ID NO: 10582 - DNA, 13 bp, Artificial Sequence
  synthetic sequence
atgttcagattga

SEQ ID NO: 10583 - DNA, 13 bp, Artificial Sequence
  synthetic sequence
tgaaagatgattg

SEQ ID NO: 10584 - DNA, 13 bp, Artificial Sequence
  synthetic sequence
gtgtattgttata

SEQ ID NO: 10585 - DNA, 13 bp, Artificial Sequence
  synthetic sequence
agcctgaaaagaa

SEQ ID NO: 10586 - DNA, 13 bp, Artificial Sequence
  synthetic sequence
aaagggaaagcca

SEQ ID NO: 10587 - DNA, 13 bp, Artificial Sequence
  synthetic sequence
ttcagttatttca

SEQ ID NO: 10588 - DNA, 13 bp, Artificial Sequence
  synthetic sequence
ctgcaatttcaga

SEQ ID NO: 10589 - DNA, 13 bp, Artificial Sequence
  synthetic sequence
cctggtttactcc

SEQ ID NO: 10590 - DNA, 13 bp, Artificial Sequence
  synthetic sequence
gggtttccttatg

SEQ ID NO: 10591 - DNA, 13 bp, Artificial Sequence
  synthetic sequence
aaatggaggaaaa

SEQ ID NO: 10592 - DNA, 13 bp, Artificial Sequence
  synthetic sequence
gatttttatgaag

SEQ ID NO: 10593 - DNA, 13 bp, Artificial Sequence
  synthetic sequence
atttgctgtacaa

SEQ ID NO: 10594 - DNA, 13 bp, Artificial Sequence
  synthetic sequence
ctaggaaaatgaa

SEQ ID NO: 10595 - DNA, 13 bp, Artificial Sequence
  synthetic sequence
tcaagagtggaat

SEQ ID NO: 10596 - DNA, 13 bp, Artificial Sequence
  synthetic sequence
cattttattaaga

SEQ ID NO: 10597 - DNA, 13 bp, Artificial Sequence
  synthetic sequence
tactattcaattt

SEQ ID NO: 10598 - DNA, 13 bp, Artificial Sequence
  synthetic sequence
aattcaaacaata

SEQ ID NO: 10599 - DNA, 13 bp, Artificial Sequence
  synthetic sequence
tttctagatcttg

SEQ ID NO: 10600 - DNA, 13 bp, Artificial Sequence
  synthetic sequence
gttccttggattt

SEQ ID NO: 10601 - DNA, 13 bp, Artificial Sequence
  synthetic sequence
gttgaccctaacc

SEQ ID NO: 10602 - DNA, 13 bp, Artificial Sequence
  synthetic sequence
ggattagttagga

SEQ ID NO: 10603 - DNA, 13 bp, Artificial Sequence
  synthetic sequence
gagttagtactac

SEQ ID NO: 10604 - DNA, 13 bp, Artificial Sequence
  synthetic sequence
aagcagacaattt

SEQ ID NO: 10605 - DNA, 13 bp, Artificial Sequence
  synthetic sequence
atcttgttttcga

SEQ ID NO: 10606 - DNA, 13 bp, Artificial Sequence
  synthetic sequence
gcttttgatgcca

SEQ ID NO: 10607 - DNA, 13 bp, Artificial Sequence
  synthetic sequence
aaagaggaagaac

SEQ ID NO: 10608 - DNA, 13 bp, Artificial Sequence
  synthetic sequence
caacagatgagga

SEQ ID NO: 10609 - DNA, 13 bp, Artificial Sequence
  synthetic sequence
agccagtttcaga

SEQ ID NO: 10610 - DNA, 13 bp, Artificial Sequence
  synthetic sequence
cttgtgttgattt

SEQ ID NO: 10611 - DNA, 13 bp, Artificial Sequence
  synthetic sequence
ggagttttccgga

SEQ ID NO: 10612 - DNA, 13 bp, Artificial Sequence
  synthetic sequence
gtactttgttttg

SEQ ID NO: 10613 - DNA, 13 bp, Artificial Sequence
  synthetic sequence
atagaatgtagga

SEQ ID NO: 10614 - DNA, 13 bp, Artificial Sequence
  synthetic sequence
gttgagataccat

SEQ ID NO: 10615 - DNA, 13 bp, Artificial Sequence
  synthetic sequence
aatccaagatgtg

SEQ ID NO: 10616 - DNA, 13 bp, Artificial Sequence
  synthetic sequence
agttttatcagaa

SEQ ID NO: 10617 - DNA, 13 bp, Artificial Sequence
  synthetic sequence
tcaattcttgtgg

SEQ ID NO: 10618 - DNA, 13 bp, Artificial Sequence
  synthetic sequence
tatactagaggtg

SEQ ID NO: 10619 - DNA, 13 bp, Artificial Sequence
  synthetic sequence
cagttgtttgcta

SEQ ID NO: 10620 - DNA, 13 bp, Artificial Sequence
  synthetic sequence
gggaatttcagat

SEQ ID NO: 10621 - DNA, 13 bp, Artificial Sequence
  synthetic sequence
gaccaaagttatg

SEQ ID NO: 10622 - DNA, 13 bp, Artificial Sequence
  synthetic sequence
gatagcagagtgc

SEQ ID NO: 10623 - DNA, 13 bp, Artificial Sequence
  synthetic sequence
gactgaatgatga

SEQ ID NO: 10624 - DNA, 13 bp, Artificial Sequence
  synthetic sequence
tttttccaatctg

SEQ ID NO: 10625 - DNA, 13 bp, Artificial Sequence
  synthetic sequence
ttcacactgctga

SEQ ID NO: 10626 - DNA, 13 bp, Artificial Sequence
  synthetic sequence
aacctcagaaatt

SEQ ID NO: 10627 - DNA, 13 bp, Artificial Sequence
  synthetic sequence
agccaagttaaca

SEQ ID NO: 10628 - DNA, 13 bp, Artificial Sequence
  synthetic sequence
tccaccaatcata

SEQ ID NO: 10629 - DNA, 13 bp, Artificial Sequence
  synthetic sequence
cagctgcaattct

SEQ ID NO: 10630 - DNA, 13 bp, Artificial Sequence
  synthetic sequence
ccacatccaattt

SEQ ID NO: 10631 - DNA, 13 bp, Artificial Sequence
  synthetic sequence
ctgactttcaatt

SEQ ID NO: 10632 - DNA, 13 bp, Artificial Sequence
  synthetic sequence
tttatctgaactt

SEQ ID NO: 10633 - DNA, 13 bp, Artificial Sequence
  synthetic sequence
tggagactttcca

SEQ ID NO: 10634 - DNA, 13 bp, Artificial Sequence
  synthetic sequence
tccacacacttct

SEQ ID NO: 10635 - DNA, 13 bp, Artificial Sequence
  synthetic sequence
ctgcaggaaaatt

SEQ ID NO: 10636 - DNA, 13 bp, Artificial Sequence
  synthetic sequence
cctgaatgatatt

SEQ ID NO: 10637 - DNA, 13 bp, Artificial Sequence
  synthetic sequence
ctcacacatccat

SEQ ID NO: 10638 - DNA, 13 bp, Artificial Sequence
  synthetic sequence
atggttcaccaga

SEQ ID NO: 10639 - DNA, 13 bp, Artificial Sequence
  synthetic sequence
caaaccactgagc

SEQ ID NO: 10640 - DNA, 13 bp, Artificial Sequence
  synthetic sequence
aagaacagtccag

SEQ ID NO: 10641 - DNA, 13 bp, Artificial Sequence
  synthetic sequence
tcatttcataatc

SEQ ID NO: 10642 - DNA, 13 bp, Artificial Sequence
  synthetic sequence
ctcccaacagtct

SEQ ID NO: 10643 - DNA, 13 bp, Artificial Sequence
  synthetic sequence
tcaccaatatccg

SEQ ID NO: 10644 - DNA, 13 bp, Artificial Sequence
  synthetic sequence
tcaagaccaacat

SEQ ID NO: 10645 - DNA, 13 bp, Artificial Sequence
  synthetic sequence
catttctgtccat

SEQ ID NO: 10646 - DNA, 13 bp, Artificial Sequence
  synthetic sequence
aaactgttgttga

SEQ ID NO: 10647 - DNA, 13 bp, Artificial Sequence
  synthetic sequence
ccagtcactgcag

SEQ ID NO: 10648 - DNA, 13 bp, Artificial Sequence
  synthetic sequence
acagaatgatgaa

SEQ ID NO: 10649 - DNA, 13 bp, Artificial Sequence
  synthetic sequence
ccatgaggaggat

SEQ ID NO: 10650 - DNA, 13 bp, Artificial Sequence
  synthetic sequence
tccaagcattcta

SEQ ID NO: 10651 - DNA, 13 bp, Artificial Sequence
  synthetic sequence
cctttctgatact

SEQ ID NO: 10652 - DNA, 13 bp, Artificial Sequence
  synthetic sequence
tgaaagataaaca

SEQ ID NO: 10653 - DNA, 13 bp, Artificial Sequence
  synthetic sequence
tagctcccacagg

SEQ ID NO: 10654 - DNA, 13 bp, Artificial Sequence
  synthetic sequence
tttcatccaacca

SEQ ID NO: 10655 - DNA, 13 bp, Artificial Sequence
  synthetic sequence
aattcccaaactg

SEQ ID NO: 10656 - DNA, 13 bp, Artificial Sequence
  synthetic sequence
ctgatgtatgtct

SEQ ID NO: 10657 - DNA, 13 bp, Artificial Sequence
  synthetic sequence
ctccatgcctgat

SEQ ID NO: 10658 - DNA, 13 bp, Artificial Sequence
  synthetic sequence
catcatttgtttt

SEQ ID NO: 10659 - DNA, 13 bp, Artificial Sequence
  synthetic sequence
tttatagatccaa

SEQ ID NO: 10660 - DNA, 13 bp, Artificial Sequence
  synthetic sequence
cctgaacctgcag

SEQ ID NO: 10661 - DNA, 13 bp, Artificial Sequence
  synthetic sequence
gcactcctgtaat

SEQ ID NO: 10662 - DNA, 13 bp, Artificial Sequence
  synthetic sequence
acataaactgttt

SEQ ID NO: 10663 - DNA, 13 bp, Artificial Sequence
  synthetic sequence
ttgagtctttgtt

SEQ ID NO: 10664 - DNA, 13 bp, Artificial Sequence
  synthetic sequence
catccagtgctcc

SEQ ID NO: 10665 - DNA, 13 bp, Artificial Sequence
  synthetic sequence
gaaaataactaat

SEQ ID NO: 10666 - DNA, 13 bp, Artificial Sequence
  synthetic sequence
agacagccctgac

SEQ ID NO: 10667 - DNA, 13 bp, Artificial Sequence
  synthetic sequence
catcctgacacta

SEQ ID NO: 10668 - DNA, 13 bp, Artificial Sequence
  synthetic sequence
catgctcctcagt

SEQ ID NO: 10669 - DNA, 13 bp, Artificial Sequence
  synthetic sequence
ccatttgccaatt

SEQ ID NO: 10670 - DNA, 13 bp, Artificial Sequence
  synthetic sequence
catgaggataaac

SEQ ID NO: 10671 - DNA, 13 bp, Artificial Sequence
  synthetic sequence
aaagcaaaagaca

SEQ ID NO: 10672 - DNA, 13 bp, Artificial Sequence
  synthetic sequence
gaaagaggagtta

SEQ ID NO: 10673 - DNA, 13 bp, Artificial Sequence
  synthetic sequence
gcactccaagaat

SEQ ID NO: 10674 - DNA, 13 bp, Artificial Sequence
  synthetic sequence
agtgtactcacct

SEQ ID NO: 10675 - DNA, 13 bp, Artificial Sequence
  synthetic sequence
atttcaactgtca

SEQ ID NO: 10676 - DNA, 13 bp, Artificial Sequence
  synthetic sequence
ttatacatttttg

SEQ ID NO: 10677 - DNA, 13 bp, Artificial Sequence
  synthetic sequence
attgcattctgta

SEQ ID NO: 10678 - DNA, 13 bp, Artificial Sequence
  synthetic sequence
aaattttggttgc

SEQ ID NO: 10679 - DNA, 13 bp, Artificial Sequence
  synthetic sequence
tggcagcaatttc

SEQ ID NO: 10680 - DNA, 13 bp, Artificial Sequence
  synthetic sequence
caatagacaaagc

SEQ ID NO: 10681 - DNA, 13 bp, Artificial Sequence
  synthetic sequence
ataataattgtca

SEQ ID NO: 10682 - DNA, 13 bp, Artificial Sequence
  synthetic sequence
gaattgtaggaac

SEQ ID NO: 10683 - DNA, 13 bp, Artificial Sequence
  synthetic sequence
acagttgtcacta

SEQ ID NO: 10684 - DNA, 13 bp, Artificial Sequence
  synthetic sequence
ggcattgaaccac

SEQ ID NO: 10685 - DNA, 13 bp, Artificial Sequence
  synthetic sequence
ctgattgttctgt

SEQ ID NO: 10686 - DNA, 13 bp, Artificial Sequence
  synthetic sequence
acaaaccaattat

SEQ ID NO: 10687 - DNA, 13 bp, Artificial Sequence
  synthetic sequence
ctttctctaatgg

SEQ ID NO: 10688 - DNA, 13 bp, Artificial Sequence
  synthetic sequence
ctgtaatggccat

SEQ ID NO: 10689 - DNA, 13 bp, Artificial Sequence
  synthetic sequence
tcactcatgattc

SEQ ID NO: 10690 - DNA, 13 bp, Artificial Sequence
  synthetic sequence
tatatggcatcct

SEQ ID NO: 10691 - DNA, 13 bp, Artificial Sequence
  synthetic sequence
tccaatcaaatca

SEQ ID NO: 10692 - DNA, 13 bp, Artificial Sequence
  synthetic sequence
ctttaagaatatt

SEQ ID NO: 10693 - DNA, 13 bp, Artificial Sequence
  synthetic sequence
gtttatcaacaga

SEQ ID NO: 10694 - DNA, 13 bp, Artificial Sequence
  synthetic sequence
cctctggttcttc

SEQ ID NO: 10695 - DNA, 13 bp, Artificial Sequence
  synthetic sequence
taaccatcccaat

SEQ ID NO: 10696 - DNA, 13 bp, Artificial Sequence
  synthetic sequence
atcttttaagaaa

SEQ ID NO: 10697 - DNA, 13 bp, Artificial Sequence
  synthetic sequence
ttaatcacctgtt

SEQ ID NO: 10698 - DNA, 13 bp, Artificial Sequence
  synthetic sequence
aagcattaaatgg

SEQ ID NO: 10699 - DNA, 13 bp, Artificial Sequence
  synthetic sequence
gctaaggttggaa

SEQ ID NO: 10700 - DNA, 13 bp, Artificial Sequence
  synthetic sequence
tgagaaaagtcaa

SEQ ID NO: 10701 - DNA, 13 bp, Artificial Sequence
  synthetic sequence
tccactatatcca

SEQ ID NO: 10702 - DNA, 13 bp, Artificial Sequence
  synthetic sequence
tcttagaaccagg

SEQ ID NO: 10703 - DNA, 13 bp, Artificial Sequence
  synthetic sequence
catccttgaagtt

SEQ ID NO: 10704 - DNA, 13 bp, Artificial Sequence
  synthetic sequence
gcttagttacacc

SEQ ID NO: 10705 - DNA, 13 bp, Artificial Sequence
  synthetic sequence
atggctttttcta

SEQ ID NO: 10706 - DNA, 13 bp, Artificial Sequence
  synthetic sequence
actcatccacaat

SEQ ID NO: 10707 - DNA, 13 bp, Artificial Sequence
  synthetic sequence
atggtgttccaga

SEQ ID NO: 10708 - DNA, 13 bp, Artificial Sequence
  synthetic sequence
ctgaagcttcttt

SEQ ID NO: 10709 - DNA, 13 bp, Artificial Sequence
  synthetic sequence
gccaagcgattca

SEQ ID NO: 10710 - DNA, 13 bp, Artificial Sequence
  synthetic sequence
taaaggacaaata

SEQ ID NO: 10711 - DNA, 13 bp, Artificial Sequence
  synthetic sequence
caaagctgtacaa

SEQ ID NO: 10712 - DNA, 13 bp, Artificial Sequence
  synthetic sequence
caattcatctttt

SEQ ID NO: 10713 - DNA, 13 bp, Artificial Sequence
  synthetic sequence
ctcaacagaccaa

SEQ ID NO: 10714 - DNA, 13 bp, Artificial Sequence
  synthetic sequence
tgggaattgtggg

SEQ ID NO: 10715 - DNA, 13 bp, Artificial Sequence
  synthetic sequence
ctgcatccaattt

SEQ ID NO: 10716 - DNA, 13 bp, Artificial Sequence
  synthetic sequence
tcttcctgatcca

SEQ ID NO: 10717 - DNA, 13 bp, Artificial Sequence
  synthetic sequence
attagtgtttgtc

SEQ ID NO: 10718 - DNA, 13 bp, Artificial Sequence
  synthetic sequence
ctttttgatgtgc

SEQ ID NO: 10719 - DNA, 13 bp, Artificial Sequence
  synthetic sequence
caacatgaatacc

SEQ ID NO: 10720 - DNA, 13 bp, Artificial Sequence
  synthetic sequence
accatcctcccac

SEQ ID NO: 10721 - DNA, 13 bp, Artificial Sequence
  synthetic sequence
ttggaaaatcttt

SEQ ID NO: 10722 - DNA, 13 bp, Artificial Sequence
  synthetic sequence
tcatctgtgtaga

SEQ ID NO: 10723 - DNA, 13 bp, Artificial Sequence
  synthetic sequence
cagtggctcctgt

SEQ ID NO: 10724 - DNA, 13 bp, Artificial Sequence
  synthetic sequence
taacagctccaag

SEQ ID NO: 10725 - DNA, 13 bp, Artificial Sequence
  synthetic sequence
gccaatgcaattg

SEQ ID NO: 10726 - DNA, 13 bp, Artificial Sequence
  synthetic sequence
ctaactacattat

SEQ ID NO: 10727 - DNA, 13 bp, Artificial Sequence
  synthetic sequence
aacattttggaaa

SEQ ID NO: 10728 - DNA, 13 bp, Artificial Sequence
  synthetic sequence
gcttgtgaaaata

SEQ ID NO: 10729 - DNA, 13 bp, Artificial Sequence
  synthetic sequence
taatagctggacc

SEQ ID NO: 10730 - DNA, 13 bp, Artificial Sequence
  synthetic sequence
ctgcacaaggagc

SEQ ID NO: 10731 - DNA, 13 bp, Artificial Sequence
  synthetic sequence
cttccttaacata

SEQ ID NO: 10732 - DNA, 13 bp, Artificial Sequence
  synthetic sequence
acagaaatagaca

SEQ ID NO: 10733 - DNA, 13 bp, Artificial Sequence
  synthetic sequence
aaaattgaagcct

SEQ ID NO: 10734 - DNA, 13 bp, Artificial Sequence
  synthetic sequence
caatctcaattct

SEQ ID NO: 10735 - DNA, 13 bp, Artificial Sequence
  synthetic sequence
cagacacggcata

SEQ ID NO: 10736 - DNA, 13 bp, Artificial Sequence
  synthetic sequence
aggtttttaagtt

SEQ ID NO: 10737 - DNA, 13 bp, Artificial Sequence
  synthetic sequence
gccaatcttggat

SEQ ID NO: 10738 - DNA, 13 bp, Artificial Sequence
  synthetic sequence
cagctaaagttgg

SEQ ID NO: 10739 - DNA, 13 bp, Artificial Sequence
  synthetic sequence
actgtcatcacta

SEQ ID NO: 10740 - DNA, 13 bp, Artificial Sequence
  synthetic sequence
taattctgtcctc

SEQ ID NO: 10741 - DNA, 13 bp, Artificial Sequence
  synthetic sequence
aactcatctacaa

SEQ ID NO: 10742 - DNA, 13 bp, Artificial Sequence
  synthetic sequence
caatggctttctc

SEQ ID NO: 10743 - DNA, 13 bp, Artificial Sequence
  synthetic sequence
gccatattcaatc

SEQ ID NO: 10744 - DNA, 13 bp, Artificial Sequence
  synthetic sequence
cttgcactcctga

SEQ ID NO: 10745 - DNA, 13 bp, Artificial Sequence
  synthetic sequence
agacatatgatct

SEQ ID NO: 10746 - DNA, 13 bp, Artificial Sequence
  synthetic sequence
ttctaatatcaac

SEQ ID NO: 10747 - DNA, 13 bp, Artificial Sequence
  synthetic sequence
ggaattaagccta

SEQ ID NO: 10748 - DNA, 13 bp, Artificial Sequence
  synthetic sequence
atgtgagagtgct

SEQ ID NO: 10749 - DNA, 13 bp, Artificial Sequence
  synthetic sequence
aacattaactcta

SEQ ID NO: 10750 - DNA, 13 bp, Artificial Sequence
  synthetic sequence
tctgaccaaactc

SEQ ID NO: 10751 - DNA, 13 bp, Artificial Sequence
  synthetic sequence
atatttacaaaca

SEQ ID NO: 10752 - DNA, 13 bp, Artificial Sequence
  synthetic sequence
tccatgcctggtc

SEQ ID NO: 10753 - DNA, 13 bp, Artificial Sequence
  synthetic sequence
ggtctgggattaa

SEQ ID NO: 10754 - DNA, 13 bp, Artificial Sequence
  synthetic sequence
tttaatttcctgc

SEQ ID NO: 10755 - DNA, 13 bp, Artificial Sequence
  synthetic sequence
tatgtggtcgatg

SEQ ID NO: 10756 - DNA, 13 bp, Artificial Sequence
  synthetic sequence
attcatccaacca

SEQ ID NO: 10757 - DNA, 13 bp, Artificial Sequence
  synthetic sequence
cagtcccagcgcc

SEQ ID NO: 10758 - DNA, 13 bp, Artificial Sequence
  synthetic sequence
tgcctatgctgcc

SEQ ID NO: 10759 - DNA, 13 bp, Artificial Sequence
  synthetic sequence
gaatgaataacat

SEQ ID NO: 10760 - DNA, 13 bp, Artificial Sequence
  synthetic sequence
gaatgctgtggtg

SEQ ID NO: 10761 - DNA, 13 bp, Artificial Sequence
  synthetic sequence
aaccttattggca

SEQ ID NO: 10762 - DNA, 13 bp, Artificial Sequence
  synthetic sequence
cccgggagtctta

SEQ ID NO: 10763 - DNA, 13 bp, Artificial Sequence
  synthetic sequence
gaggctaataagc

SEQ ID NO: 10764 - DNA, 13 bp, Artificial Sequence
  synthetic sequence
acttttgatgatt

SEQ ID NO: 10765 - DNA, 13 bp, Artificial Sequence
  synthetic sequence
gaattgatttcgt

SEQ ID NO: 10766 - DNA, 13 bp, Artificial Sequence
  synthetic sequence
gtgagcgccttca

SEQ ID NO: 10767 - DNA, 13 bp, Artificial Sequence
  synthetic sequence
tcagcctgctcta

SEQ ID NO: 10768 - DNA, 13 bp, Artificial Sequence
  synthetic sequence
atgacctttggcc

SEQ ID NO: 10769 - DNA, 13 bp, Artificial Sequence
  synthetic sequence
ttgagcagaaccc

SEQ ID NO: 10770 - DNA, 13 bp, Artificial Sequence
  synthetic sequence
tcatacgcggggc

SEQ ID NO: 10771 - DNA, 13 bp, Artificial Sequence
  synthetic sequence
atagccacggccg

SEQ ID NO: 10772 - DNA, 13 bp, Artificial Sequence
  synthetic sequence
gttgaggccatgg

SEQ ID NO: 10773 - DNA, 13 bp, Artificial Sequence
  synthetic sequence
tagtccactgccg

SEQ ID NO: 10774 - DNA, 13 bp, Artificial Sequence
  synthetic sequence
gtttgtgatttcc

SEQ ID NO: 10775 - DNA, 13 bp, Artificial Sequence
  synthetic sequence
ataagaccttccg

SEQ ID NO: 10776 - DNA, 13 bp, Artificial Sequence
  synthetic sequence
gatgattcagtgg

SEQ ID NO: 10777 - DNA, 13 bp, Artificial Sequence
  synthetic sequence
accaaccctatgt

SEQ ID NO: 10778 - DNA, 13 bp, Artificial Sequence
  synthetic sequence
tgtgccggctgca

SEQ ID NO: 10779 - DNA, 13 bp, Artificial Sequence
  synthetic sequence
atcagatccctgc

SEQ ID NO: 10780 - DNA, 13 bp, Artificial Sequence
  synthetic sequence
tgtccgtgagtcc

SEQ ID NO: 10781 - DNA, 13 bp, Artificial Sequence
  synthetic sequence
tccagcgggttat

SEQ ID NO: 10782 - DNA, 13 bp, Artificial Sequence
  synthetic sequence
aaggtgtatgcag

SEQ ID NO: 10783 - DNA, 13 bp, Artificial Sequence
  synthetic sequence
cccttgattggtc

SEQ ID NO: 10784 - DNA, 13 bp, Artificial Sequence
  synthetic sequence
gtttttacgcagg

SEQ ID NO: 10785 - DNA, 13 bp, Artificial Sequence
  synthetic sequence
ctaatacacctta

SEQ ID NO: 10786 - DNA, 13 bp, Artificial Sequence
  synthetic sequence
accaggtccctgt

SEQ ID NO: 10787 - DNA, 13 bp, Artificial Sequence
  synthetic sequence
ctggtgagactat

SEQ ID NO: 10788 - DNA, 13 bp, Artificial Sequence
  synthetic sequence
taccagcacagcc

SEQ ID NO: 10789 - DNA, 13 bp, Artificial Sequence
  synthetic sequence
gcccctgtacctg

SEQ ID NO: 10790 - DNA, 13 bp, Artificial Sequence
  synthetic sequence
tctgaggtcgacc

SEQ ID NO: 10791 - DNA, 13 bp, Artificial Sequence
  synthetic sequence
accacccggcacc

SEQ ID NO: 10792 - DNA, 13 bp, Artificial Sequence
  synthetic sequence
tgcagtgatcact

SEQ ID NO: 10793 - DNA, 13 bp, Artificial Sequence
  synthetic sequence
ttttgggaggctg

SEQ ID NO: 10794 - DNA, 13 bp, Artificial Sequence
  synthetic sequence
tgccgacggtggc

SEQ ID NO: 10795 - DNA, 13 bp, Artificial Sequence
  synthetic sequence
aatgataacccca

SEQ ID NO: 10796 - DNA, 13 bp, Artificial Sequence
  synthetic sequence
gcccctagcgccg

SEQ ID NO: 10797 - DNA, 13 bp, Artificial Sequence
  synthetic sequence
gttgtgattgatg

SEQ ID NO: 10798 - DNA, 13 bp, Artificial Sequence
  synthetic sequence
tggaacatggcga

SEQ ID NO: 10799 - DNA, 13 bp, Artificial Sequence
  synthetic sequence
gtaaattctgctg

SEQ ID NO: 10800 - DNA, 13 bp, Artificial Sequence
  synthetic sequence
tggttgtgcccac

SEQ ID NO: 10801 - DNA, 13 bp, Artificial Sequence
  synthetic sequence
agtctatgggggc

SEQ ID NO: 10802 - DNA, 13 bp, Artificial Sequence
  synthetic sequence
gccctctataggg

SEQ ID NO: 10803 - DNA, 13 bp, Artificial Sequence
  synthetic sequence
ccgtcacctgccc

SEQ ID NO: 10804 - DNA, 13 bp, Artificial Sequence
  synthetic sequence
gtgcgggctataa

SEQ ID NO: 10805 - DNA, 13 bp, Artificial Sequence
  synthetic sequence
tggttccgtgcca

SEQ ID NO: 10806 - DNA, 13 bp, Artificial Sequence
  synthetic sequence
gagaatgcgcagc

SEQ ID NO: 10807 - DNA, 13 bp, Artificial Sequence
  synthetic sequence
ttgaaaatgactt

SEQ ID NO: 10808 - DNA, 13 bp, Artificial Sequence
  synthetic sequence
tttggtgccaccc

SEQ ID NO: 10809 - DNA, 13 bp, Artificial Sequence
  synthetic sequence
gacccctgggaac

SEQ ID NO: 10810 - DNA, 13 bp, Artificial Sequence
  synthetic sequence
cagccacacgttt

SEQ ID NO: 10811 - DNA, 13 bp, Artificial Sequence
  synthetic sequence
gcatgccccaatg

SEQ ID NO: 10812 - DNA, 13 bp, Artificial Sequence
  synthetic sequence
aggggactttgta

SEQ ID NO: 10813 - DNA, 13 bp, Artificial Sequence
  synthetic sequence
agaacctcgggac

SEQ ID NO: 10814 - DNA, 13 bp, Artificial Sequence
  synthetic sequence
aatgcacagcagg

SEQ ID NO: 10815 - DNA, 13 bp, Artificial Sequence
  synthetic sequence
agtatggtttttg

SEQ ID NO: 10816 - DNA, 13 bp, Artificial Sequence
  synthetic sequence
ggctgtatgctgg

SEQ ID NO: 10817 - DNA, 13 bp, Artificial Sequence
  synthetic sequence
tctgatataattg

SEQ ID NO: 10818 - DNA, 13 bp, Artificial Sequence
  synthetic sequence
tcgctgaccggtg

SEQ ID NO: 10819 - DNA, 13 bp, Artificial Sequence
  synthetic sequence
tctcttgattggt

SEQ ID NO: 10820 - DNA, 13 bp, Artificial Sequence
  synthetic sequence
tctgaggtggacc

SEQ ID NO: 10821 - DNA, 13 bp, Artificial Sequence
  synthetic sequence
tatgaagcggccc

SEQ ID NO: 10822 - DNA, 13 bp, Artificial Sequence
  synthetic sequence
tatatagagcgct

SEQ ID NO: 10823 - DNA, 13 bp, Artificial Sequence
  synthetic sequence
cttactgcagccc

SEQ ID NO: 10824 - DNA, 13 bp, Artificial Sequence
  synthetic sequence
ggaacaccgtttg

SEQ ID NO: 10825 - DNA, 13 bp, Artificial Sequence
  synthetic sequence
ggggatgttgatg

SEQ ID NO: 10826 - DNA, 13 bp, Artificial Sequence
  synthetic sequence
gccggccctgtgt

SEQ ID NO: 10827 - DNA, 13 bp, Artificial Sequence
  synthetic sequence
cccctgttaattc

SEQ ID NO: 10828 - DNA, 13 bp, Artificial Sequence
  synthetic sequence
gctgtgattactg

SEQ ID NO: 10829 - DNA, 13 bp, Artificial Sequence
  synthetic sequence
ccacctacactac

SEQ ID NO: 10830 - DNA, 13 bp, Artificial Sequence
  synthetic sequence
tgttaccacctgg

SEQ ID NO: 10831 - DNA, 13 bp, Artificial Sequence
  synthetic sequence
tgccccctgtcga

SEQ ID NO: 10832 - DNA, 13 bp, Artificial Sequence
  synthetic sequence
cgcggcaacccag

SEQ ID NO: 10833 - DNA, 13 bp, Artificial Sequence
  synthetic sequence
ttaatgacaaccc

SEQ ID NO: 10834 - DNA, 13 bp, Artificial Sequence
  synthetic sequence
tttggtgccacct

SEQ ID NO: 10835 - DNA, 13 bp, Artificial Sequence
  synthetic sequence
ggcgtctaattac

SEQ ID NO: 10836 - DNA, 13 bp, Artificial Sequence
  synthetic sequence
tctggaactaatc

SEQ ID NO: 10837 - DNA, 13 bp, Artificial Sequence
  synthetic sequence
atgggggctgggc

SEQ ID NO: 10838 - DNA, 13 bp, Artificial Sequence
  synthetic sequence
gagccgcaatgcg

SEQ ID NO: 10839 - DNA, 13 bp, Artificial Sequence
  synthetic sequence
taggtttgtatgc

SEQ ID NO: 10840 - DNA, 13 bp, Artificial Sequence
  synthetic sequence
cgttttatccgac

SEQ ID NO: 10841 - DNA, 13 bp, Artificial Sequence
  synthetic sequence
cttcgtgcatgga

SEQ ID NO: 10842 - DNA, 13 bp, Artificial Sequence
  synthetic sequence
ccaatcctatgta

SEQ ID NO: 10843 - DNA, 13 bp, Artificial Sequence
  synthetic sequence
ccacacgatttat

SEQ ID NO: 10844 - DNA, 13 bp, Artificial Sequence
  synthetic sequence
ttaattaggttgt

SEQ ID NO: 10845 - DNA, 13 bp, Artificial Sequence
  synthetic sequence
accgggtcgttcg

SEQ ID NO: 10846 - DNA, 13 bp, Artificial Sequence
  synthetic sequence
acttggtccacat

SEQ ID NO: 10847 - DNA, 13 bp, Artificial Sequence
  synthetic sequence
cagtaagaggtat

SEQ ID NO: 10848 - DNA, 13 bp, Artificial Sequence
  synthetic sequence
attatccctagca

SEQ ID NO: 10849 - DNA, 13 bp, Artificial Sequence
  synthetic sequence
gtggtgatagatg

SEQ ID NO: 10850 - DNA, 13 bp, Artificial Sequence
  synthetic sequence
gttctctacgctg

SEQ ID NO: 10851 - DNA, 13 bp, Artificial Sequence
  synthetic sequence
gctcaccgcggcc

SEQ ID NO: 10852 - DNA, 13 bp, Artificial Sequence
  synthetic sequence
agactacaactac

SEQ ID NO: 10853 - DNA, 13 bp, Artificial Sequence
  synthetic sequence
cagcgccattcgc

SEQ ID NO: 10854 - DNA, 13 bp, Artificial Sequence
  synthetic sequence
cggcctgctgcgt

SEQ ID NO: 10855 - DNA, 13 bp, Artificial Sequence
  synthetic sequence
accagattcctgc

SEQ ID NO: 10856 - DNA, 13 bp, Artificial Sequence
  synthetic sequence
gactaaggctggc

SEQ ID NO: 10857 - DNA, 13 bp, Artificial Sequence
  synthetic sequence
cggtgcttgggaa

SEQ ID NO: 10858 - DNA, 13 bp, Artificial Sequence
  synthetic sequence
ccagcgcctgata

SEQ ID NO: 10859 - DNA, 13 bp, Artificial Sequence
  synthetic sequence
gctctcggctggc

SEQ ID NO: 10860 - DNA, 13 bp, Artificial Sequence
  synthetic sequence
gtatggccgcccc

SEQ ID NO: 10861 - DNA, 13 bp, Artificial Sequence
  synthetic sequence
gaccggcctaccc

SEQ ID NO: 10862 - DNA, 13 bp, Artificial Sequence
  synthetic sequence
ctggtggggcgcc

SEQ ID NO: 10863 - DNA, 13 bp, Artificial Sequence
  synthetic sequence
tgcgcctagcagt

SEQ ID NO: 10864 - DNA, 13 bp, Artificial Sequence
  synthetic sequence
ggcccctgtcgcc

SEQ ID NO: 10865 - DNA, 13 bp, Artificial Sequence
  synthetic sequence
ttgcgcgaggtcg

SEQ ID NO: 10866 - DNA, 13 bp, Artificial Sequence
  synthetic sequence
tgtcgcttcgggt

SEQ ID NO: 10867 - DNA, 13 bp, Artificial Sequence
  synthetic sequence
ctactggggtcag

SEQ ID NO: 10868 - DNA, 13 bp, Artificial Sequence
  synthetic sequence
ccagcgagtcata

SEQ ID NO: 10869 - DNA, 13 bp, Artificial Sequence
  synthetic sequence
gccatgcttttta

SEQ ID NO: 10870 - DNA, 13 bp, Artificial Sequence
  synthetic sequence
catgccccagtgg

SEQ ID NO: 10871 - DNA, 13 bp, Artificial Sequence
  synthetic sequence
gtgctgctgctca

SEQ ID NO: 10872 - DNA, 13 bp, Artificial Sequence
  synthetic sequence
ctatcggccagaa

SEQ ID NO: 10873 - DNA, 13 bp, Artificial Sequence
  synthetic sequence
ttggccctactcc

SEQ ID NO: 10874 - DNA, 13 bp, Artificial Sequence
  synthetic sequence
acctataccacta

SEQ ID NO: 10875 - DNA, 13 bp, Artificial Sequence
  synthetic sequence
ctattaaccccgg

SEQ ID NO: 10876 - DNA, 13 bp, Artificial Sequence
  synthetic sequence
aaaggcatgcgtc

SEQ ID NO: 10877 - DNA, 13 bp, Artificial Sequence
  synthetic sequence
caaggtgtatgcg

SEQ ID NO: 10878 - DNA, 13 bp, Artificial Sequence
  synthetic sequence
ctgacatggggtt

SEQ ID NO: 10879 - DNA, 13 bp, Artificial Sequence
  synthetic sequence
ccccgtccgcgag

SEQ ID NO: 10880 - DNA, 13 bp, Artificial Sequence
  synthetic sequence
catgcattttacc

SEQ ID NO: 10881 - DNA, 13 bp, Artificial Sequence
  synthetic sequence
attatgcccagta

SEQ ID NO: 10882 - DNA, 13 bp, Artificial Sequence
  synthetic sequence
gagctcatacgtg

SEQ ID NO: 10883 - DNA, 13 bp, Artificial Sequence
  synthetic sequence
gctatatgctgga

SEQ ID NO: 10884 - DNA, 13 bp, Artificial Sequence
  synthetic sequence
accctctgttcct

SEQ ID NO: 10885 - DNA, 13 bp, Artificial Sequence
  synthetic sequence
ctcccgactatag

SEQ ID NO: 10886 - DNA, 13 bp, Artificial Sequence
  synthetic sequence
gctgacaggcgga

SEQ ID NO: 10887 - DNA, 13 bp, Artificial Sequence
  synthetic sequence
tggttttcacgca

SEQ ID NO: 10888 - DNA, 13 bp, Artificial Sequence
  synthetic sequence
gtggcaaccctga

SEQ ID NO: 10889 - DNA, 13 bp, Artificial Sequence
  synthetic sequence
ggtagagaagggt

SEQ ID NO: 10890 - DNA, 13 bp, Artificial Sequence
  synthetic sequence
tgtcgccgctccg

SEQ ID NO: 10891 - DNA, 13 bp, Artificial Sequence
  synthetic sequence
ttttgctgcttta

SEQ ID NO: 10892 - DNA, 13 bp, Artificial Sequence
  synthetic sequence
attgagaaggaga

SEQ ID NO: 10893 - DNA, 13 bp, Artificial Sequence
  synthetic sequence
gctccagttttat

SEQ ID NO: 10894 - DNA, 13 bp, Artificial Sequence
  synthetic sequence
gatgttgattctc

SEQ ID NO: 10895 - DNA, 13 bp, Artificial Sequence
  synthetic sequence
cccatggtaaggt

SEQ ID NO: 10896 - DNA, 13 bp, Artificial Sequence
  synthetic sequence
atcagcctgctcc

SEQ ID NO: 10897 - DNA, 13 bp, Artificial Sequence
  synthetic sequence
cactaccgcaatc

SEQ ID NO: 10898 - DNA, 13 bp, Artificial Sequence
  synthetic sequence
tggtctacatctg

SEQ ID NO: 10899 - DNA, 13 bp, Artificial Sequence
  synthetic sequence
tcttattcaatct

SEQ ID NO: 10900 - DNA, 13 bp, Artificial Sequence
  synthetic sequence
atttcaccgggac

SEQ ID NO: 10901 - DNA, 13 bp, Artificial Sequence
  synthetic sequence
gggttaccctcgg

SEQ ID NO: 10902 - DNA, 13 bp, Artificial Sequence
  synthetic sequence
tgccgacagaatt

SEQ ID NO: 10903 - DNA, 13 bp, Artificial Sequence
  synthetic sequence
ccgagcctgctgg

SEQ ID NO: 10904 - DNA, 13 bp, Artificial Sequence
  synthetic sequence
tcccacctaatat

SEQ ID NO: 10905 - DNA, 13 bp, Artificial Sequence
  synthetic sequence
agggagcgcggaa

SEQ ID NO: 10906 - DNA, 13 bp, Artificial Sequence
  synthetic sequence
ggcgcagccccag

SEQ ID NO: 10907 - DNA, 13 bp, Artificial Sequence
  synthetic sequence
acacgggacacaa

SEQ ID NO: 10908 - DNA, 13 bp, Artificial Sequence
  synthetic sequence
ggctcgccattgg

SEQ ID NO: 10909 - DNA, 13 bp, Artificial Sequence
  synthetic sequence
tgcgccgcccacg

SEQ ID NO: 10910 - DNA, 13 bp, Artificial Sequence
  synthetic sequence
cactgactcctca

SEQ ID NO: 10911 - DNA, 13 bp, Artificial Sequence
  synthetic sequence
cactcctccataa

SEQ ID NO: 10912 - DNA, 13 bp, Artificial Sequence
  synthetic sequence
taaccacacggga

SEQ ID NO: 10913 - DNA, 13 bp, Artificial Sequence
  synthetic sequence
gttgaacgagggt

SEQ ID NO: 10914 - DNA, 13 bp, Artificial Sequence
  synthetic sequence
gcattcggcacca

SEQ ID NO: 10915 - DNA, 13 bp, Artificial Sequence
  synthetic sequence
aaatcctaacatc

SEQ ID NO: 10916 - DNA, 13 bp, Artificial Sequence
  synthetic sequence
cggggttgcatca

SEQ ID NO: 10917 - DNA, 13 bp, Artificial Sequence
  synthetic sequence
gggccccaattct

SEQ ID NO: 10918 - DNA, 13 bp, Artificial Sequence
  synthetic sequence
tatcagcaagatt

SEQ ID NO: 10919 - DNA, 13 bp, Artificial Sequence
  synthetic sequence
ctcctcctcagcc

SEQ ID NO: 10920 - DNA, 13 bp, Artificial Sequence
  synthetic sequence
atgcttcttccag

SEQ ID NO: 10921 - DNA, 13 bp, Artificial Sequence
  synthetic sequence
catgtggtggcct

SEQ ID NO: 10922 - DNA, 13 bp, Artificial Sequence
  synthetic sequence
cgcgagacatcac

SEQ ID NO: 10923 - DNA, 13 bp, Artificial Sequence
  synthetic sequence
ccgtcgtgaatca

SEQ ID NO: 10924 - DNA, 13 bp, Artificial Sequence
  synthetic sequence
tcaaccttcaatt

SEQ ID NO: 10925 - DNA, 13 bp, Artificial Sequence
  synthetic sequence
gcattctcaatca

SEQ ID NO: 10926 - DNA, 13 bp, Artificial Sequence
  synthetic sequence
tccagccccggat

SEQ ID NO: 10927 - DNA, 13 bp, Artificial Sequence
  synthetic sequence
ccggggatgtaat

SEQ ID NO: 10928 - DNA, 13 bp, Artificial Sequence
  synthetic sequence
caccaactatttt

SEQ ID NO: 10929 - DNA, 13 bp, Artificial Sequence
  synthetic sequence
tcccatgggcgat

SEQ ID NO: 10930 - DNA, 13 bp, Artificial Sequence
  synthetic sequence
cataaaatgtctt

SEQ ID NO: 10931 - DNA, 13 bp, Artificial Sequence
  synthetic sequence
tagcgctgatggc

SEQ ID NO: 10932 - DNA, 13 bp, Artificial Sequence
  synthetic sequence
agtgcaaaatcaa

SEQ ID NO: 10933 - DNA, 13 bp, Artificial Sequence
  synthetic sequence
gacaaattatact

SEQ ID NO: 10934 - DNA, 13 bp, Artificial Sequence
  synthetic sequence
agatgggcgccat

SEQ ID NO: 10935 - DNA, 13 bp, Artificial Sequence
  synthetic sequence
gggtgagctcata

SEQ ID NO: 10936 - DNA, 13 bp, Artificial Sequence
  synthetic sequence
cccagatatggac

SEQ ID NO: 10937 - DNA, 13 bp, Artificial Sequence
  synthetic sequence
gccacattaacaa

SEQ ID NO: 10938 - DNA, 13 bp, Artificial Sequence
  synthetic sequence
taaagtgggcctt

SEQ ID NO: 10939 - DNA, 13 bp, Artificial Sequence
  synthetic sequence
cgtgtcatcccat

SEQ ID NO: 10940 - DNA, 13 bp, Artificial Sequence
  synthetic sequence
tcggctggctcca

SEQ ID NO: 10941 - DNA, 13 bp, Artificial Sequence
  synthetic sequence
ctctaatgccagg

SEQ ID NO: 10942 - DNA, 13 bp, Artificial Sequence
  synthetic sequence
acgacgggagcaa

SEQ ID NO: 10943 - DNA, 13 bp, Artificial Sequence
  synthetic sequence
tgcccaggggaga

SEQ ID NO: 10944 - DNA, 13 bp, Artificial Sequence
  synthetic sequence
tgatagtgcacaa

SEQ ID NO: 10945 - DNA, 13 bp, Artificial Sequence
  synthetic sequence
cgaaggactgaga

SEQ ID NO: 10946 - DNA, 13 bp, Artificial Sequence
  synthetic sequence
gcagcaaaagcac

SEQ ID NO: 10947 - DNA, 13 bp, Artificial Sequence
  synthetic sequence
cccggcagtactg

SEQ ID NO: 10948 - DNA, 13 bp, Artificial Sequence
  synthetic sequence
aatcgcaccaggg

SEQ ID NO: 10949 - DNA, 13 bp, Artificial Sequence
  synthetic sequence
ccgaggaggcccg

SEQ ID NO: 10950 - DNA, 13 bp, Artificial Sequence
  synthetic sequence
gccaccagctcgt

SEQ ID NO: 10951 - DNA, 13 bp, Artificial Sequence
  synthetic sequence
ctgattcatcaaa

SEQ ID NO: 10952 - DNA, 13 bp, Artificial Sequence
  synthetic sequence
cagcctttcgctg

SEQ ID NO: 10953 - DNA, 13 bp, Artificial Sequence
  synthetic sequence
actggaatgcaca

SEQ ID NO: 10954 - DNA, 13 bp, Artificial Sequence
  synthetic sequence
tgtgtgaggtgtg

SEQ ID NO: 10955 - DNA, 13 bp, Artificial Sequence
  synthetic sequence
ctccaggccgata

SEQ ID NO: 10956 - DNA, 13 bp, Artificial Sequence
  synthetic sequence
tagggcgcggggt

SEQ ID NO: 10957 - DNA, 13 bp, Artificial Sequence
  synthetic sequence
ggctcgtggtctg

SEQ ID NO: 10958 - DNA, 13 bp, Artificial Sequence
  synthetic sequence
cggccgcctcagg

SEQ ID NO: 10959 - DNA, 13 bp, Artificial Sequence
  synthetic sequence
cgttcccaggcat

SEQ ID NO: 10960 - DNA, 13 bp, Artificial Sequence
  synthetic sequence
acagtagccgtta

SEQ ID NO: 10961 - DNA, 13 bp, Artificial Sequence
  synthetic sequence
tgccaccaactag

SEQ ID NO: 10962 - DNA, 13 bp, Artificial Sequence
  synthetic sequence
tcccatcagcacc

SEQ ID NO: 10963 - DNA, 13 bp, Artificial Sequence
  synthetic sequence
gatggccgacctc

SEQ ID NO: 10964 - DNA, 13 bp, Artificial Sequence
  synthetic sequence
agcaatgtgctat

SEQ ID NO: 10965 - DNA, 13 bp, Artificial Sequence
  synthetic sequence
taataccacggag

SEQ ID NO: 10966 - DNA, 13 bp, Artificial Sequence
  synthetic sequence
tcaagcacagcta

SEQ ID NO: 10967 - DNA, 13 bp, Artificial Sequence
  synthetic sequence
gctcttgtggcat

SEQ ID NO: 10968 - DNA, 13 bp, Artificial Sequence
  synthetic sequence
tggtgccatcctg

SEQ ID NO: 10969 - DNA, 13 bp, Artificial Sequence
  synthetic sequence
cacgggtgggggc

SEQ ID NO: 10970 - DNA, 13 bp, Artificial Sequence
  synthetic sequence
gggcggtggtaac

SEQ ID NO: 10971 - DNA, 13 bp, Artificial Sequence
  synthetic sequence
atagcatgggccc

SEQ ID NO: 10972 - DNA, 13 bp, Artificial Sequence
  synthetic sequence
tgaacctattgta

SEQ ID NO: 10973 - DNA, 13 bp, Artificial Sequence
  synthetic sequence
aggcgcagcggga

SEQ ID NO: 10974 - DNA, 13 bp, Artificial Sequence
  synthetic sequence
tcctcagccaact

SEQ ID NO: 10975 - DNA, 13 bp, Artificial Sequence
  synthetic sequence
gaaacatcaagat

SEQ ID NO: 10976 - DNA, 13 bp, Artificial Sequence
  synthetic sequence
ttacgctcccagg

SEQ ID NO: 10977 - DNA, 13 bp, Artificial Sequence
  synthetic sequence
gcagtgtgctatg

SEQ ID NO: 10978 - DNA, 13 bp, Artificial Sequence
  synthetic sequence
ggctgccacctcc

SEQ ID NO: 10979 - DNA, 13 bp, Artificial Sequence
  synthetic sequence
cgtacctgccgac

SEQ ID NO: 10980 - DNA, 13 bp, Artificial Sequence
  synthetic sequence
tagactggaaagc

SEQ ID NO: 10981 - DNA, 13 bp, Artificial Sequence
  synthetic sequence
ggggagaagtcgc

SEQ ID NO: 10982 - DNA, 13 bp, Artificial Sequence
  synthetic sequence
gacccctcagagg

SEQ ID NO: 10983 - DNA, 13 bp, Artificial Sequence
  synthetic sequence
tggcgacaagtgc

SEQ ID NO: 10984 - DNA, 13 bp, Artificial Sequence
  synthetic sequence
tagagtaacccct

SEQ ID NO: 10985 - DNA, 13 bp, Artificial Sequence
  synthetic sequence
tctcaagcgcaag

SEQ ID NO: 10986 - DNA, 13 bp, Artificial Sequence
  synthetic sequence
ccaggccttccgc

SEQ ID NO: 10987 - DNA, 13 bp, Artificial Sequence
  synthetic sequence
gggagcaggtctc

SEQ ID NO: 10988 - DNA, 13 bp, Artificial Sequence
  synthetic sequence
gacaagttcatac

SEQ ID NO: 10989 - DNA, 13 bp, Artificial Sequence
  synthetic sequence
gccacattgacaa

SEQ ID NO: 10990 - DNA, 13 bp, Artificial Sequence
  synthetic sequence
actccaagccgaa

SEQ ID NO: 10991 - DNA, 13 bp, Artificial Sequence
  synthetic sequence
ccggggagaaagg

SEQ ID NO: 10992 - DNA, 13 bp, Artificial Sequence
  synthetic sequence
ggcgagtaagtgc

SEQ ID NO: 10993 - DNA, 13 bp, Artificial Sequence
  synthetic sequence
gtcccatcggcac

SEQ ID NO: 10994 - DNA, 13 bp, Artificial Sequence
  synthetic sequence
gaggctcgctgca

SEQ ID NO: 10995 - DNA, 13 bp, Artificial Sequence
  synthetic sequence
ccagctggtggta

SEQ ID NO: 10996 - DNA, 13 bp, Artificial Sequence
  synthetic sequence
tagatgcattaac

SEQ ID NO: 10997 - DNA, 13 bp, Artificial Sequence
  synthetic sequence
gaataccagcgct

SEQ ID NO: 10998 - DNA, 13 bp, Artificial Sequence
  synthetic sequence
gggctaatacacc

SEQ ID NO: 10999 - DNA, 13 bp, Artificial Sequence
  synthetic sequence
tctcagtaaaatg

SEQ ID NO: 11000 - DNA, 13 bp, Artificial Sequence
  synthetic sequence
aggcgggggtgtt

SEQ ID NO: 11001 - DNA, 13 bp, Artificial Sequence
  synthetic sequence
gcgggctcaaagt

SEQ ID NO: 11002 - DNA, 13 bp, Artificial Sequence
  synthetic sequence
cgttaaccagcca

SEQ ID NO: 11003 - DNA, 13 bp, Artificial Sequence
  synthetic sequence
cagagacatcaag

SEQ ID NO: 11004 - DNA, 13 bp, Artificial Sequence
  synthetic sequence
tggagggcagcat

SEQ ID NO: 11005 - DNA, 13 bp, Artificial Sequence
  synthetic sequence
ggcaggggaccgc

SEQ ID NO: 11006 - DNA, 13 bp, Artificial Sequence
  synthetic sequence
tcttgttgcgggg

SEQ ID NO: 11007 - DNA, 13 bp, Artificial Sequence
  synthetic sequence
cccagcaggcacg

SEQ ID NO: 11008 - DNA, 13 bp, Artificial Sequence
  synthetic sequence
agaacagccctag

SEQ ID NO: 11009 - DNA, 13 bp, Artificial Sequence
  synthetic sequence
cacggctggtcgt

SEQ ID NO: 11010 - DNA, 13 bp, Artificial Sequence
  synthetic sequence
accccggcggtga

SEQ ID NO: 11011 - DNA, 13 bp, Artificial Sequence
  synthetic sequence
tcaagctcgagtg

SEQ ID NO: 11012 - DNA, 13 bp, Artificial Sequence
  synthetic sequence
agtattggtgccg

SEQ ID NO: 11013 - DNA, 13 bp, Artificial Sequence
  synthetic sequence
atgtagtcacggc

SEQ ID NO: 11014 - DNA, 13 bp, Artificial Sequence
  synthetic sequence
aacggtaattgcg

SEQ ID NO: 11015 - DNA, 13 bp, Artificial Sequence
  synthetic sequence
agaagggggcaca

SEQ ID NO: 11016 - DNA, 13 bp, Artificial Sequence
  synthetic sequence
ggcggtggtggcc

SEQ ID NO: 11017 - DNA, 13 bp, Artificial Sequence
  synthetic sequence
taatcaaccttca

SEQ ID NO: 11018 - DNA, 13 bp, Artificial Sequence
  synthetic sequence
gtagtatgaccag

SEQ ID NO: 11019 - DNA, 13 bp, Artificial Sequence
  synthetic sequence
agactccttcggc

SEQ ID NO: 11020 - DNA, 13 bp, Artificial Sequence
  synthetic sequence
ccacacccgatgt

SEQ ID NO: 11021 - DNA, 13 bp, Artificial Sequence
  synthetic sequence
taacgctgatggc

SEQ ID NO: 11022 - DNA, 13 bp, Artificial Sequence
  synthetic sequence
cgtactgctcagg

SEQ ID NO: 11023 - DNA, 13 bp, Artificial Sequence
  synthetic sequence
tgaaccgggacag

SEQ ID NO: 11024 - DNA, 13 bp, Artificial Sequence
  synthetic sequence
tataaaggagccg

SEQ ID NO: 11025 - DNA, 13 bp, Artificial Sequence
  synthetic sequence
gccccgggttgtg

SEQ ID NO: 11026 - DNA, 13 bp, Artificial Sequence
  synthetic sequence
cacaaaacatcat

SEQ ID NO: 11027 - DNA, 13 bp, Artificial Sequence
  synthetic sequence
cgccaactgttgc

SEQ ID NO: 11028 - DNA, 13 bp, Artificial Sequence
  synthetic sequence
ggcgatggtggcc

SEQ ID NO: 11029 - DNA, 13 bp, Artificial Sequence
  synthetic sequence
tcacatgtggtag

SEQ ID NO: 11030 - DNA, 13 bp, Artificial Sequence
  synthetic sequence
agacgtgacgcac

SEQ ID NO: 11031 - DNA, 13 bp, Artificial Sequence
  synthetic sequence
cgtcacgattgca

SEQ ID NO: 11032 - DNA, 13 bp, Artificial Sequence
  synthetic sequence
cgaggttgcatca

SEQ ID NO: 11033 - DNA, 13 bp, Artificial Sequence
  synthetic sequence
tggtgtggacggc

SEQ ID NO: 11034 - DNA, 13 bp, Artificial Sequence
  synthetic sequence
cggcgagtgcggg

SEQ ID NO: 11035 - DNA, 13 bp, Artificial Sequence
  synthetic sequence
gaccggctgcatt

SEQ ID NO: 11036 - DNA, 13 bp, Artificial Sequence
  synthetic sequence
gatggccagggtt

SEQ ID NO: 11037 - DNA, 13 bp, Artificial Sequence
  synthetic sequence
gttgccatcgtga

SEQ ID NO: 11038 - DNA, 13 bp, Artificial Sequence
  synthetic sequence
cgtgagcggggac

SEQ ID NO: 11039 - DNA, 13 bp, Artificial Sequence
  synthetic sequence
tgcaggctcagct

SEQ ID NO: 11040 - DNA, 13 bp, Artificial Sequence
  synthetic sequence
tcctggagaggca

SEQ ID NO: 11041 - DNA, 13 bp, Artificial Sequence
  synthetic sequence
acgctatcggaca

SEQ ID NO: 11042 - DNA, 13 bp, Artificial Sequence
  synthetic sequence
gacagatagtcaa

SEQ ID NO: 11043 - DNA, 13 bp, Artificial Sequence
  synthetic sequence
cagagtgtggagc

SEQ ID NO: 11044 - DNA, 13 bp, Artificial Sequence
  synthetic sequence
gcgggtgatcacc

SEQ ID NO: 11045 - DNA, 13 bp, Artificial Sequence
  synthetic sequence
tatcagcgagatt

SEQ ID NO: 11046 - DNA, 13 bp, Artificial Sequence
  synthetic sequence
taaaatgtcttgg

SEQ ID NO: 11047 - DNA, 13 bp, Artificial Sequence
  synthetic sequence
gccgtcaggcgtg

SEQ ID NO: 11048 - DNA, 13 bp, Artificial Sequence
  synthetic sequence
ctcataagtcacg

SEQ ID NO: 11049 - DNA, 13 bp, Artificial Sequence
  synthetic sequence
tatgccaggctgg

SEQ ID NO: 11050 - DNA, 13 bp, Artificial Sequence
  synthetic sequence
ttggctcgaagga

SEQ ID NO: 11051 - DNA, 13 bp, Artificial Sequence
  synthetic sequence
gattatactgacg

SEQ ID NO: 11052 - DNA, 13 bp, Artificial Sequence
  synthetic sequence
cggccagcgcgag

SEQ ID NO: 11053 - DNA, 13 bp, Artificial Sequence
  synthetic sequence
ggccccagttctt

SEQ ID NO: 11054 - DNA, 13 bp, Artificial Sequence
  synthetic sequence
gcttactaaccgg

SEQ ID NO: 11055 - DNA, 13 bp, Artificial Sequence
  synthetic sequence
atagaatgtctta

SEQ ID NO: 11056 - DNA, 13 bp, Artificial Sequence
  synthetic sequence
tgtggggtgtgaa

SEQ ID NO: 11057 - DNA, 13 bp, Artificial Sequence
  synthetic sequence
ctagacttcccgg

SEQ ID NO: 11058 - DNA, 13 bp, Artificial Sequence
  synthetic sequence
gcatttggcacca

SEQ ID NO: 11059 - DNA, 13 bp, Artificial Sequence
  synthetic sequence
catactgctcagg

SEQ ID NO: 11060 - DNA, 13 bp, Artificial Sequence
  synthetic sequence
agccggtcccaga

SEQ ID NO: 11061 - DNA, 13 bp, Artificial Sequence
  synthetic sequence
agatctatgtcat

SEQ ID NO: 11062 - DNA, 13 bp, Artificial Sequence
  synthetic sequence
acgctgccaccct

SEQ ID NO: 11063 - DNA, 13 bp, Artificial Sequence
  synthetic sequence
gccatccacgccg

SEQ ID NO: 11064 - DNA, 13 bp, Artificial Sequence
  synthetic sequence
gaccgggcctttg

SEQ ID NO: 11065 - DNA, 13 bp, Artificial Sequence
  synthetic sequence
tttctgttctgcg

SEQ ID NO: 11066 - DNA, 13 bp, Artificial Sequence
  synthetic sequence
tctgcccagtgga

SEQ ID NO: 11067 - DNA, 13 bp, Artificial Sequence
  synthetic sequence
cagtccttccgat

SEQ ID NO: 11068 - DNA, 13 bp, Artificial Sequence
  synthetic sequence
ggctgccagaagg

SEQ ID NO: 11069 - DNA, 13 bp, Artificial Sequence
  synthetic sequence
tcttcctttcata

SEQ ID NO: 11070 - DNA, 13 bp, Artificial Sequence
  synthetic sequence
agaccaccaacac

SEQ ID NO: 11071 - DNA, 13 bp, Artificial Sequence
  synthetic sequence
acggcgctcctgc

SEQ ID NO: 11072 - DNA, 13 bp, Artificial Sequence
  synthetic sequence
ctcctcataccac

SEQ ID NO: 11073 - DNA, 13 bp, Artificial Sequence
  synthetic sequence
ttccctaggcaat

SEQ ID NO: 11074 - DNA, 13 bp, Artificial Sequence
  synthetic sequence
cgccttccaactg

SEQ ID NO: 11075 - DNA, 13 bp, Artificial Sequence
  synthetic sequence
tccctcctagcca

SEQ ID NO: 11076 - DNA, 13 bp, Artificial Sequence
  synthetic sequence
ggatgacattctc

SEQ ID NO: 11077 - DNA, 13 bp, Artificial Sequence
  synthetic sequence
ggcctctatcctc

SEQ ID NO: 11078 - DNA, 13 bp, Artificial Sequence
  synthetic sequence
gaggctattattc

SEQ ID NO: 11079 - DNA, 13 bp, Artificial Sequence
  synthetic sequence
gtccttaccccgc

SEQ ID NO: 11080 - DNA, 13 bp, Artificial Sequence
  synthetic sequence
cagctacgacacc

SEQ ID NO: 11081 - DNA, 13 bp, Artificial Sequence
  synthetic sequence
gggggaggtttaa

SEQ ID NO: 11082 - DNA, 13 bp, Artificial Sequence
  synthetic sequence
ttccagccctact

SEQ ID NO: 11083 - DNA, 13 bp, Artificial Sequence
  synthetic sequence
ggcgctacctgaa

SEQ ID NO: 11084 - DNA, 13 bp, Artificial Sequence
  synthetic sequence
ctggaagcgagac

SEQ ID NO: 11085 - DNA, 13 bp, Artificial Sequence
  synthetic sequence
tggcctctcacag

SEQ ID NO: 11086 - DNA, 13 bp, Artificial Sequence
  synthetic sequence
tggtgccccatct

SEQ ID NO: 11087 - DNA, 13 bp, Artificial Sequence
  synthetic sequence
ctaattcccatgt

SEQ ID NO: 11088 - DNA, 13 bp, Artificial Sequence
  synthetic sequence
tatttcaagcttc

SEQ ID NO: 11089 - DNA, 13 bp, Artificial Sequence
  synthetic sequence
atgcgtttccccg

SEQ ID NO: 11090 - DNA, 13 bp, Artificial Sequence
  synthetic sequence
acgtcctatactc

SEQ ID NO: 11091 - DNA, 13 bp, Artificial Sequence
  synthetic sequence
cctcctgcagtac

SEQ ID NO: 11092 - DNA, 13 bp, Artificial Sequence
  synthetic sequence
ccagccatcttta

SEQ ID NO: 11093 - DNA, 13 bp, Artificial Sequence
  synthetic sequence
acccatttcaaat

SEQ ID NO: 11094 - DNA, 13 bp, Artificial Sequence
  synthetic sequence
ctataaaatttcc

SEQ ID NO: 11095 - DNA, 13 bp, Artificial Sequence
  synthetic sequence
ttattatcagccc

SEQ ID NO: 11096 - DNA, 13 bp, Artificial Sequence
  synthetic sequence
ctaggggctatta

SEQ ID NO: 11097 - DNA, 13 bp, Artificial Sequence
  synthetic sequence
atagccctctagg

SEQ ID NO: 11098 - DNA, 13 bp, Artificial Sequence
  synthetic sequence
tcccaagacttcc

SEQ ID NO: 11099 - DNA, 13 bp, Artificial Sequence
  synthetic sequence
aacatatttctag

SEQ ID NO: 11100 - DNA, 13 bp, Artificial Sequence
  synthetic sequence
gaacccacccttg

SEQ ID NO: 11101 - DNA, 13 bp, Artificial Sequence
  synthetic sequence
agttacgatttcc

SEQ ID NO: 11102 - DNA, 13 bp, Artificial Sequence
  synthetic sequence
aatcaaccacctg

SEQ ID NO: 11103 - DNA, 13 bp, Artificial Sequence
  synthetic sequence
ctttccggacaac

SEQ ID NO: 11104 - DNA, 13 bp, Artificial Sequence
  synthetic sequence
tcagaagctattt

SEQ ID NO: 11105 - DNA, 13 bp, Artificial Sequence
  synthetic sequence
tgtcacctgttcc

SEQ ID NO: 11106 - DNA, 13 bp, Artificial Sequence
  synthetic sequence
ctagccagtgccc

SEQ ID NO: 11107 - DNA, 13 bp, Artificial Sequence
  synthetic sequence
ctcccctgccaat

SEQ ID NO: 11108 - DNA, 13 bp, Artificial Sequence
  synthetic sequence
atgtccctcgcct

SEQ ID NO: 11109 - DNA, 13 bp, Artificial Sequence
  synthetic sequence
cccagtttatgca

SEQ ID NO: 11110 - DNA, 13 bp, Artificial Sequence
  synthetic sequence
gcttactatcgcg

SEQ ID NO: 11111 - DNA, 13 bp, Artificial Sequence
  synthetic sequence
gaccaaatatatt

SEQ ID NO: 11112 - DNA, 13 bp, Artificial Sequence
  synthetic sequence
gagccccaaatat

SEQ ID NO: 11113 - DNA, 13 bp, Artificial Sequence
  synthetic sequence
ccgattcaaaaat

SEQ ID NO: 11114 - DNA, 13 bp, Artificial Sequence
  synthetic sequence
ccatggaaatcaa

SEQ ID NO: 11115 - DNA, 13 bp, Artificial Sequence
  synthetic sequence
atggcacgcatat

SEQ ID NO: 11116 - DNA, 13 bp, Artificial Sequence
  synthetic sequence
ttccggtgcggga

SEQ ID NO: 11117 - DNA, 13 bp, Artificial Sequence
  synthetic sequence
gatgtcaatttta

SEQ ID NO: 11118 - DNA, 13 bp, Artificial Sequence
  synthetic sequence
ttccgccaccgca

SEQ ID NO: 11119 - DNA, 13 bp, Artificial Sequence
  synthetic sequence
gctctctcctgca

SEQ ID NO: 11120 - DNA, 13 bp, Artificial Sequence
  synthetic sequence
tcacctgggaccc

SEQ ID NO: 11121 - DNA, 13 bp, Artificial Sequence
  synthetic sequence
tcaaaaaccacaa

SEQ ID NO: 11122 - DNA, 13 bp, Artificial Sequence
  synthetic sequence
ttaaaccagaacg

SEQ ID NO: 11123 - DNA, 13 bp, Artificial Sequence
  synthetic sequence
tggacccactgct

SEQ ID NO: 11124 - DNA, 13 bp, Artificial Sequence
  synthetic sequence
tcccaccctgttc

SEQ ID NO: 11125 - DNA, 13 bp, Artificial Sequence
  synthetic sequence
caacaatccacaa

SEQ ID NO: 11126 - DNA, 13 bp, Artificial Sequence
  synthetic sequence
tctgccaaaccat

SEQ ID NO: 11127 - DNA, 13 bp, Artificial Sequence
  synthetic sequence
gtacctccctgag

SEQ ID NO: 11128 - DNA, 13 bp, Artificial Sequence
  synthetic sequence
atggcattcttaa

SEQ ID NO: 11129 - DNA, 13 bp, Artificial Sequence
  synthetic sequence
gacctccgggaag

SEQ ID NO: 11130 - DNA, 13 bp, Artificial Sequence
  synthetic sequence
cataaacaccgcc

SEQ ID NO: 11131 - DNA, 13 bp, Artificial Sequence
  synthetic sequence
tggcaaaacggcc

SEQ ID NO: 11132 - DNA, 13 bp, Artificial Sequence
  synthetic sequence
aattaagttccta

SEQ ID NO: 11133 - DNA, 13 bp, Artificial Sequence
  synthetic sequence
gtcggcccgtaat

SEQ ID NO: 11134 - DNA, 13 bp, Artificial Sequence
  synthetic sequence
tcccagttaaaaa

SEQ ID NO: 11135 - DNA, 13 bp, Artificial Sequence
  synthetic sequence
actcttcctccaa

SEQ ID NO: 11136 - DNA, 13 bp, Artificial Sequence
  synthetic sequence
ccccctgccctaa

SEQ ID NO: 11137 - DNA, 13 bp, Artificial Sequence
  synthetic sequence
cgctcttgccacg

SEQ ID NO: 11138 - DNA, 13 bp, Artificial Sequence
  synthetic sequence
aggatatgacccc

SEQ ID NO: 11139 - DNA, 13 bp, Artificial Sequence
  synthetic sequence
cacatggtgcccc

SEQ ID NO: 11140 - DNA, 13 bp, Artificial Sequence
  synthetic sequence
aaggtcagggccc

SEQ ID NO: 11141 - DNA, 13 bp, Artificial Sequence
  synthetic sequence
ttcgttttctgtt

SEQ ID NO: 11142 - DNA, 13 bp, Artificial Sequence
  synthetic sequence
gaaaaggtcaagg

SEQ ID NO: 11143 - DNA, 13 bp, Artificial Sequence
  synthetic sequence
cgggcctttgtcc

SEQ ID NO: 11144 - DNA, 13 bp, Artificial Sequence
  synthetic sequence
tttaacgaaaaag

SEQ ID NO: 11145 - DNA, 13 bp, Artificial Sequence
  synthetic sequence
ctctaccagcttt

SEQ ID NO: 11146 - DNA, 13 bp, Artificial Sequence
  synthetic sequence
gtatctccctgag

SEQ ID NO: 11147 - DNA, 13 bp, Artificial Sequence
  synthetic sequence
ctctcatcatctt

SEQ ID NO: 11148 - DNA, 13 bp, Artificial Sequence
  synthetic sequence
aatttctctcctg

SEQ ID NO: 11149 - DNA, 13 bp, Artificial Sequence
  synthetic sequence
tgaggggttgtcg

SEQ ID NO: 11150 - DNA, 13 bp, Artificial Sequence
  synthetic sequence
aggcaccacaggc

SEQ ID NO: 11151 - DNA, 13 bp, Artificial Sequence
  synthetic sequence
ggacacgtcaggg

SEQ ID NO: 11152 - DNA, 13 bp, Artificial Sequence
  synthetic sequence
cctgaactgtctc

SEQ ID NO: 11153 - DNA, 13 bp, Artificial Sequence
  synthetic sequence
ggcagtcagtcgt

SEQ ID NO: 11154 - DNA, 13 bp, Artificial Sequence
  synthetic sequence
cgtggagagccgg

SEQ ID NO: 11155 - DNA, 13 bp, Artificial Sequence
  synthetic sequence
tccatgattggca

SEQ ID NO: 11156 - DNA, 13 bp, Artificial Sequence
  synthetic sequence
gtgaggaaggccc

SEQ ID NO: 11157 - DNA, 13 bp, Artificial Sequence
  synthetic sequence
agagactgtgaag

SEQ ID NO: 11158 - DNA, 13 bp, Artificial Sequence
  synthetic sequence
tctgatgttgtgg

SEQ ID NO: 11159 - DNA, 13 bp, Artificial Sequence
  synthetic sequence
attgtaggggaca

SEQ ID NO: 11160 - DNA, 13 bp, Artificial Sequence
  synthetic sequence
caaataaggcctg

SEQ ID NO: 11161 - DNA, 13 bp, Artificial Sequence
  synthetic sequence
gagatcaaggcct

SEQ ID NO: 11162 - DNA, 13 bp, Artificial Sequence
  synthetic sequence
atgatggcccagt

SEQ ID NO: 11163 - DNA, 13 bp, Artificial Sequence
  synthetic sequence
tctacccatacat

SEQ ID NO: 11164 - DNA, 13 bp, Artificial Sequence
  synthetic sequence
gcagctcgcttga

SEQ ID NO: 11165 - DNA, 13 bp, Artificial Sequence
  synthetic sequence
gtataattagtgc

SEQ ID NO: 11166 - DNA, 13 bp, Artificial Sequence
  synthetic sequence
aggtggccagtag

SEQ ID NO: 11167 - DNA, 13 bp, Artificial Sequence
  synthetic sequence
gaggtgagcttaa

SEQ ID NO: 11168 - DNA, 13 bp, Artificial Sequence
  synthetic sequence
tcttagaggttct

SEQ ID NO: 11169 - DNA, 13 bp, Artificial Sequence
  synthetic sequence
gcgtctttaaggt

SEQ ID NO: 11170 - DNA, 13 bp, Artificial Sequence
  synthetic sequence
ggaacactggggt

SEQ ID NO: 11171 - DNA, 13 bp, Artificial Sequence
  synthetic sequence
atggctgcgaacg

SEQ ID NO: 11172 - DNA, 13 bp, Artificial Sequence
  synthetic sequence
gggtttataagag

SEQ ID NO: 11173 - DNA, 13 bp, Artificial Sequence
  synthetic sequence
ggtcctttccact

SEQ ID NO: 11174 - DNA, 13 bp, Artificial Sequence
  synthetic sequence
gtcaaactgctgc

SEQ ID NO: 11175 - DNA, 13 bp, Artificial Sequence
  synthetic sequence
gagggccgtctgt

SEQ ID NO: 11176 - DNA, 13 bp, Artificial Sequence
  synthetic sequence
gggctgagaaggc

SEQ ID NO: 11177 - DNA, 13 bp, Artificial Sequence
  synthetic sequence
aagttaagccagt

SEQ ID NO: 11178 - DNA, 13 bp, Artificial Sequence
  synthetic sequence
cggcagcgacggg

SEQ ID NO: 11179 - DNA, 13 bp, Artificial Sequence
  synthetic sequence
tgtgacagggcct

SEQ ID NO: 11180 - DNA, 13 bp, Artificial Sequence
  synthetic sequence
agtggtgaagctg

SEQ ID NO: 11181 - DNA, 13 bp, Artificial Sequence
  synthetic sequence
gcctgcctccagg

SEQ ID NO: 11182 - DNA, 13 bp, Artificial Sequence
  synthetic sequence
gggaaatatcttt

SEQ ID NO: 11183 - DNA, 13 bp, Artificial Sequence
  synthetic sequence
tagtgccggggcc

SEQ ID NO: 11184 - DNA, 13 bp, Artificial Sequence
  synthetic sequence
ttcattcacccgg

SEQ ID NO: 11185 - DNA, 13 bp, Artificial Sequence
  synthetic sequence
ggatgaatcgcca

SEQ ID NO: 11186 - DNA, 13 bp, Artificial Sequence
  synthetic sequence
tctcgccttaatc

SEQ ID NO: 11187 - DNA, 13 bp, Artificial Sequence
  synthetic sequence
gcggagacaagcc

SEQ ID NO: 11188 - DNA, 13 bp, Artificial Sequence
  synthetic sequence
agtagagaaatgg

SEQ ID NO: 11189 - DNA, 13 bp, Artificial Sequence
  synthetic sequence
aaaagggtggtgg

SEQ ID NO: 11190 - DNA, 13 bp, Artificial Sequence
  synthetic sequence
caaactggctggg

SEQ ID NO: 11191 - DNA, 13 bp, Artificial Sequence
  synthetic sequence
ggcagaatagatg

SEQ ID NO: 11192 - DNA, 13 bp, Artificial Sequence
  synthetic sequence
ggcaagattacag

SEQ ID NO: 11193 - DNA, 13 bp, Artificial Sequence
  synthetic sequence
tgtatttgtcgag

SEQ ID NO: 11194 - DNA, 13 bp, Artificial Sequence
  synthetic sequence
aagggggagtatt

SEQ ID NO: 11195 - DNA, 13 bp, Artificial Sequence
  synthetic sequence
aggcgttctacga

SEQ ID NO: 11196 - DNA, 13 bp, Artificial Sequence
  synthetic sequence
acgtagactgggt

SEQ ID NO: 11197 - DNA, 13 bp, Artificial Sequence
  synthetic sequence
gaggagactatag

SEQ ID NO: 11198 - DNA, 13 bp, Artificial Sequence
  synthetic sequence
atcataagtgagg

SEQ ID NO: 11199 - DNA, 13 bp, Artificial Sequence
  synthetic sequence
acagtagtggtgc

SEQ ID NO: 11200 - DNA, 13 bp, Artificial Sequence
  synthetic sequence
agctggggctgta

SEQ ID NO: 11201 - DNA, 13 bp, Artificial Sequence
  synthetic sequence
agcttcgatagtc

SEQ ID NO: 11202 - DNA, 13 bp, Artificial Sequence
  synthetic sequence
cattctttgtttg

SEQ ID NO: 11203 - DNA, 13 bp, Artificial Sequence
  synthetic sequence
agaaaagtgttcc

SEQ ID NO: 11204 - DNA, 13 bp, Artificial Sequence
  synthetic sequence
tgcagacaacgga

SEQ ID NO: 11205 - DNA, 13 bp, Artificial Sequence
  synthetic sequence
catgcccggagga

SEQ ID NO: 11206 - DNA, 13 bp, Artificial Sequence
  synthetic sequence
atagggctatgga

SEQ ID NO: 11207 - DNA, 13 bp, Artificial Sequence
  synthetic sequence
ttgggggaaagct

SEQ ID NO: 11208 - DNA, 13 bp, Artificial Sequence
  synthetic sequence
ccagtcaggactc

SEQ ID NO: 11209 - DNA, 13 bp, Artificial Sequence
  synthetic sequence
gagaaggcacggc

SEQ ID NO: 11210 - DNA, 13 bp, Artificial Sequence
  synthetic sequence
catttgccatggg

SEQ ID NO: 11211 - DNA, 13 bp, Artificial Sequence
  synthetic sequence
aaatataaaggag

SEQ ID NO: 11212 - DNA, 13 bp, Artificial Sequence
  synthetic sequence
aggcgtgaaactt

SEQ ID NO: 11213 - DNA, 13 bp, Artificial Sequence
  synthetic sequence
gtgattccagttt

SEQ ID NO: 11214 - DNA, 13 bp, Artificial Sequence
  synthetic sequence
taaggctatctag

SEQ ID NO: 11215 - DNA, 13 bp, Artificial Sequence
  synthetic sequence
gttcggcccgttg

SEQ ID NO: 11216 - DNA, 13 bp, Artificial Sequence
  synthetic sequence
gaagaggaaagcc

SEQ ID NO: 11217 - DNA, 13 bp, Artificial Sequence
  synthetic sequence
atgggagattagg

SEQ ID NO: 11218 - DNA, 13 bp, Artificial Sequence
  synthetic sequence
gggaggtagatcc

SEQ ID NO: 11219 - DNA, 13 bp, Artificial Sequence
  synthetic sequence
gggggatttgtgg

SEQ ID NO: 11220 - DNA, 13 bp, Artificial Sequence
  synthetic sequence
aggcttgcctaga

SEQ ID NO: 11221 - DNA, 13 bp, Artificial Sequence
  synthetic sequence
tgagggaatagat

SEQ ID NO: 11222 - DNA, 13 bp, Artificial Sequence
  synthetic sequence
taataggagggca

SEQ ID NO: 11223 - DNA, 13 bp, Artificial Sequence
  synthetic sequence
ggggcctgagagg

SEQ ID NO: 11224 - DNA, 13 bp, Artificial Sequence
  synthetic sequence
gggtaaaggaggg

SEQ ID NO: 11225 - DNA, 13 bp, Artificial Sequence
  synthetic sequence
aggctgaacggag

SEQ ID NO: 11226 - DNA, 13 bp, Artificial Sequence
  synthetic sequence
cggaaatgttttt

SEQ ID NO: 11227 - DNA, 13 bp, Artificial Sequence
  synthetic sequence
agaggaggggcgg

SEQ ID NO: 11228 - DNA, 13 bp, Artificial Sequence
  synthetic sequence
agtttctctcctg

SEQ ID NO: 11229 - DNA, 13 bp, Artificial Sequence
  synthetic sequence
gagagtgctatag

SEQ ID NO: 11230 - DNA, 13 bp, Artificial Sequence
  synthetic sequence
ccccaactgtgta

SEQ ID NO: 11231 - DNA, 13 bp, Artificial Sequence
  synthetic sequence
caggcaaagcgtg

SEQ ID NO: 11232 - DNA, 13 bp, Artificial Sequence
  synthetic sequence
aatgaaagggaaa

SEQ ID NO: 11233 - DNA, 13 bp, Artificial Sequence
  synthetic sequence
ctgggaggctcta

SEQ ID NO: 11234 - DNA, 13 bp, Artificial Sequence
  synthetic sequence
ggaagttgctgca

SEQ ID NO: 11235 - DNA, 13 bp, Artificial Sequence
  synthetic sequence
gggtagaagaaga

SEQ ID NO: 11236 - DNA, 13 bp, Artificial Sequence
  synthetic sequence
gggaggacctgcc

SEQ ID NO: 11237 - DNA, 13 bp, Artificial Sequence
  synthetic sequence
tgcgagccccctc

SEQ ID NO: 11238 - DNA, 13 bp, Artificial Sequence
  synthetic sequence
gatacgtcagggc

SEQ ID NO: 11239 - DNA, 13 bp, Artificial Sequence
  synthetic sequence
tgaagcgtgaaac

SEQ ID NO: 11240 - DNA, 13 bp, Artificial Sequence
  synthetic sequence
taggtctttcact

SEQ ID NO: 11241 - DNA, 13 bp, Artificial Sequence
  synthetic sequence
agaagtttatctg

SEQ ID NO: 11242 - DNA, 13 bp, Artificial Sequence
  synthetic sequence
gaaacttgagagg

SEQ ID NO: 11243 - DNA, 13 bp, Artificial Sequence
  synthetic sequence
gaacagcatgcaa

SEQ ID NO: 11244 - DNA, 13 bp, Artificial Sequence
  synthetic sequence
aaccaggagggcc

SEQ ID NO: 11245 - DNA, 13 bp, Artificial Sequence
  synthetic sequence
tggacggccagat

SEQ ID NO: 11246 - DNA, 13 bp, Artificial Sequence
  synthetic sequence
gattgtgatgaaa

SEQ ID NO: 11247 - DNA, 13 bp, Artificial Sequence
  synthetic sequence
aatcaatggagca

SEQ ID NO: 11248 - DNA, 13 bp, Artificial Sequence
  synthetic sequence
ggctctttgagaa

SEQ ID NO: 11249 - DNA, 13 bp, Artificial Sequence
  synthetic sequence
cccttcatgctgg

SEQ ID NO: 11250 - DNA, 13 bp, Artificial Sequence
  synthetic sequence
accatgggaatta

SEQ ID NO: 11251 - DNA, 13 bp, Artificial Sequence
  synthetic sequence
aggacatctggtg

SEQ ID NO: 11252 - DNA, 13 bp, Artificial Sequence
  synthetic sequence
ggatggaatgtga

SEQ ID NO: 11253 - DNA, 13 bp, Artificial Sequence
  synthetic sequence
gcttggctggatt

SEQ ID NO: 11254 - DNA, 13 bp, Artificial Sequence
  synthetic sequence
tggttcatgtggc

SEQ ID NO: 11255 - DNA, 13 bp, Artificial Sequence
  synthetic sequence
tggatgcttggca

SEQ ID NO: 11256 - DNA, 13 bp, Artificial Sequence
  synthetic sequence
tgctcatgcagag

SEQ ID NO: 11257 - DNA, 13 bp, Artificial Sequence
  synthetic sequence
gttggagatgaat

SEQ ID NO: 11258 - DNA, 13 bp, Artificial Sequence
  synthetic sequence
gtgctcctcatag

SEQ ID NO: 11259 - DNA, 13 bp, Artificial Sequence
  synthetic sequence
cagtgtggagagg

SEQ ID NO: 11260 - DNA, 13 bp, Artificial Sequence
  synthetic sequence
gaccaacgtcagg

SEQ ID NO: 11261 - DNA, 13 bp, Artificial Sequence
  synthetic sequence
ccggctcacccat

SEQ ID NO: 11262 - DNA, 13 bp, Artificial Sequence
  synthetic sequence
atgtggtgctagt

SEQ ID NO: 11263 - DNA, 13 bp, Artificial Sequence
  synthetic sequence
gcttgttggacgg

SEQ ID NO: 11264 - DNA, 13 bp, Artificial Sequence
  synthetic sequence
gatggacgaacca

SEQ ID NO: 11265 - DNA, 13 bp, Artificial Sequence
  synthetic sequence
ctcatggcaaatg

SEQ ID NO: 11266 - DNA, 13 bp, Artificial Sequence
  synthetic sequence
tggagctactacg

SEQ ID NO: 11267 - DNA, 13 bp, Artificial Sequence
  synthetic sequence
gaacagttgtcat

SEQ ID NO: 11268 - DNA, 13 bp, Artificial Sequence
  synthetic sequence
ggaaagcatgggg

SEQ ID NO: 11269 - DNA, 13 bp, Artificial Sequence
  synthetic sequence
atagcatggatga

SEQ ID NO: 11270 - DNA, 13 bp, Artificial Sequence
  synthetic sequence
tgggacacgccat

SEQ ID NO: 11271 - DNA, 13 bp, Artificial Sequence
  synthetic sequence
ttcatgggaaaga

SEQ ID NO: 11272 - DNA, 13 bp, Artificial Sequence
  synthetic sequence
ttggctgttgggg

SEQ ID NO: 11273 - DNA, 13 bp, Artificial Sequence
  synthetic sequence
aatgttttccaca

SEQ ID NO: 11274 - DNA, 13 bp, Artificial Sequence
  synthetic sequence
ggcacaaagtggt

SEQ ID NO: 11275 - DNA, 13 bp, Artificial Sequence
  synthetic sequence
tagcgctcacatc

SEQ ID NO: 11276 - DNA, 13 bp, Artificial Sequence
  synthetic sequence
ctcaacgcaatgt

SEQ ID NO: 11277 - DNA, 13 bp, Artificial Sequence
  synthetic sequence
gggggaatgtctt

SEQ ID NO: 11278 - DNA, 13 bp, Artificial Sequence
  synthetic sequence
tggtggcagcaaa

SEQ ID NO: 11279 - DNA, 13 bp, Artificial Sequence
  synthetic sequence
acttgtcacggga

SEQ ID NO: 11280 - DNA, 13 bp, Artificial Sequence
  synthetic sequence
tagaaggagccag

SEQ ID NO: 11281 - DNA, 13 bp, Artificial Sequence
  synthetic sequence
aggcagcagccat

SEQ ID NO: 11282 - DNA, 13 bp, Artificial Sequence
  synthetic sequence
ctgcaatcacagg

SEQ ID NO: 11283 - DNA, 13 bp, Artificial Sequence
  synthetic sequence
acaaaagaggagg

SEQ ID NO: 11284 - DNA, 13 bp, Artificial Sequence
  synthetic sequence
gctcttgggtcac

SEQ ID NO: 11285 - DNA, 13 bp, Artificial Sequence
  synthetic sequence
tccagacaaaacc

SEQ ID NO: 11286 - DNA, 13 bp, Artificial Sequence
  synthetic sequence
acatacacatgcc

SEQ ID NO: 11287 - DNA, 13 bp, Artificial Sequence
  synthetic sequence
aaacaacactcgt

SEQ ID NO: 11288 - DNA, 13 bp, Artificial Sequence
  synthetic sequence
agatcgtccacaa

SEQ ID NO: 11289 - DNA, 13 bp, Artificial Sequence
  synthetic sequence
gagtgtgatggag

SEQ ID NO: 11290 - DNA, 13 bp, Artificial Sequence
  synthetic sequence
ccttcggagactc

SEQ ID NO: 11291 - DNA, 13 bp, Artificial Sequence
  synthetic sequence
gaagtggcatctt

SEQ ID NO: 11292 - DNA, 13 bp, Artificial Sequence
  synthetic sequence
accaggcattcca

SEQ ID NO: 11293 - DNA, 13 bp, Artificial Sequence
  synthetic sequence
gaagacatgctgc

SEQ ID NO: 11294 - DNA, 13 bp, Artificial Sequence
  synthetic sequence
tcccagtacgata

SEQ ID NO: 11295 - DNA, 13 bp, Artificial Sequence
  synthetic sequence
caatgtgcctcca

SEQ ID NO: 11296 - DNA, 13 bp, Artificial Sequence
  synthetic sequence
caggcgtccaaaa

SEQ ID NO: 11297 - DNA, 13 bp, Artificial Sequence
  synthetic sequence
agcattgacacat

SEQ ID NO: 11298 - DNA, 13 bp, Artificial Sequence
  synthetic sequence
agcatggcactgg

SEQ ID NO: 11299 - DNA, 13 bp, Artificial Sequence
  synthetic sequence
agcagtggaagga

SEQ ID NO: 11300 - DNA, 13 bp, Artificial Sequence
  synthetic sequence
tgcgcatgtcttg

SEQ ID NO: 11301 - DNA, 13 bp, Artificial Sequence
  synthetic sequence
ctctagtgctcac

SEQ ID NO: 11302 - DNA, 13 bp, Artificial Sequence
  synthetic sequence
tacgtcaccacat

SEQ ID NO: 11303 - DNA, 13 bp, Artificial Sequence
  synthetic sequence
ggactctcatcaa

SEQ ID NO: 11304 - DNA, 13 bp, Artificial Sequence
  synthetic sequence
aacagaggtcaca

SEQ ID NO: 11305 - DNA, 13 bp, Artificial Sequence
  synthetic sequence
tgggaggacatcc

SEQ ID NO: 11306 - DNA, 13 bp, Artificial Sequence
  synthetic sequence
acaaaagtcacca

SEQ ID NO: 11307 - DNA, 13 bp, Artificial Sequence
  synthetic sequence
tcacgtacgaatg

SEQ ID NO: 11308 - DNA, 13 bp, Artificial Sequence
  synthetic sequence
aacagagtgccca

SEQ ID NO: 11309 - DNA, 13 bp, Artificial Sequence
  synthetic sequence
agccaacttgctg

SEQ ID NO: 11310 - DNA, 13 bp, Artificial Sequence
  synthetic sequence
gtgttggtgacgg

SEQ ID NO: 11311 - DNA, 13 bp, Artificial Sequence
  synthetic sequence
ctggggtagtgtg

SEQ ID NO: 11312 - DNA, 13 bp, Artificial Sequence
  synthetic sequence
gacctagagagtt

SEQ ID NO: 11313 - DNA, 13 bp, Artificial Sequence
  synthetic sequence
ccctcaagtggtt

SEQ ID NO: 11314 - DNA, 13 bp, Artificial Sequence
  synthetic sequence
tgcgaggagagtg

SEQ ID NO: 11315 - DNA, 13 bp, Artificial Sequence
  synthetic sequence
ccgggaatgaggg

SEQ ID NO: 11316 - DNA, 13 bp, Artificial Sequence
  synthetic sequence
agcttttgatgac

SEQ ID NO: 11317 - DNA, 13 bp, Artificial Sequence
  synthetic sequence
ctgacaccacccc

SEQ ID NO: 11318 - DNA, 13 bp, Artificial Sequence
  synthetic sequence
aacttggtgacta

SEQ ID NO: 11319 - DNA, 13 bp, Artificial Sequence
  synthetic sequence
gtggaaaagagtg

SEQ ID NO: 11320 - DNA, 13 bp, Artificial Sequence
  synthetic sequence
tagccggaccaaa

SEQ ID NO: 11321 - DNA, 13 bp, Artificial Sequence
  synthetic sequence
tgaagggagctca

SEQ ID NO: 11322 - DNA, 13 bp, Artificial Sequence
  synthetic sequence
actgactggtgct

SEQ ID NO: 11323 - DNA, 13 bp, Artificial Sequence
  synthetic sequence
gctctctcgtcaa

SEQ ID NO: 11324 - DNA, 13 bp, Artificial Sequence
  synthetic sequence
gctgcccagagaa

SEQ ID NO: 11325 - DNA, 13 bp, Artificial Sequence
  synthetic sequence
ctcggaaacccat

SEQ ID NO: 11326 - DNA, 13 bp, Artificial Sequence
  synthetic sequence
atcgtgcagggtg

SEQ ID NO: 11327 - DNA, 13 bp, Artificial Sequence
  synthetic sequence
caatcacgagatg

SEQ ID NO: 11328 - DNA, 13 bp, Artificial Sequence
  synthetic sequence
ccccaagtccaga

SEQ ID NO: 11329 - DNA, 13 bp, Artificial Sequence
  synthetic sequence
cccacgactggag

SEQ ID NO: 11330 - DNA, 13 bp, Artificial Sequence
  synthetic sequence
acatcaggccacc

SEQ ID NO: 11331 - DNA, 13 bp, Artificial Sequence
  synthetic sequence
gctttggccttct

SEQ ID NO: 11332 - DNA, 13 bp, Artificial Sequence
  synthetic sequence
cttaggacggctg

SEQ ID NO: 11333 - DNA, 13 bp, Artificial Sequence
  synthetic sequence
aggaaaattctgc

SEQ ID NO: 11334 - DNA, 13 bp, Artificial Sequence
  synthetic sequence
ttgatgggccgcg

SEQ ID NO: 11335 - DNA, 13 bp, Artificial Sequence
  synthetic sequence
tagaaaatgaagc

SEQ ID NO: 11336 - DNA, 13 bp, Artificial Sequence
  synthetic sequence
gatgcactggaaa

SEQ ID NO: 11337 - DNA, 13 bp, Artificial Sequence
  synthetic sequence
aacactttcacga

SEQ ID NO: 11338 - DNA, 13 bp, Artificial Sequence
  synthetic sequence
aatggagactggg

SEQ ID NO: 11339 - DNA, 13 bp, Artificial Sequence
  synthetic sequence
atagggaatggtt

SEQ ID NO: 11340 - DNA, 13 bp, Artificial Sequence
  synthetic sequence
ggcatggagcagt

SEQ ID NO: 11341 - DNA, 13 bp, Artificial Sequence
  synthetic sequence
gcagtggacctca

SEQ ID NO: 11342 - DNA, 13 bp, Artificial Sequence
  synthetic sequence
cccaatccatgat

SEQ ID NO: 11343 - DNA, 13 bp, Artificial Sequence
  synthetic sequence
gattgggactttg

SEQ ID NO: 11344 - DNA, 13 bp, Artificial Sequence
  synthetic sequence
caccctgttctgt

SEQ ID NO: 11345 - DNA, 13 bp, Artificial Sequence
  synthetic sequence
gctcagtgaagtt

SEQ ID NO: 11346 - DNA, 13 bp, Artificial Sequence
  synthetic sequence
gcggtggatctca

SEQ ID NO: 11347 - DNA, 13 bp, Artificial Sequence
  synthetic sequence
tcaagcttggtga

SEQ ID NO: 11348 - DNA, 13 bp, Artificial Sequence
  synthetic sequence
ttgccatcactgt

SEQ ID NO: 11349 - DNA, 13 bp, Artificial Sequence
  synthetic sequence
agtgtggcaatga

SEQ ID NO: 11350 - DNA, 13 bp, Artificial Sequence
  synthetic sequence
caacaactttgaa

SEQ ID NO: 11351 - DNA, 13 bp, Artificial Sequence
  synthetic sequence
agatgtactgggt

SEQ ID NO: 11352 - DNA, 13 bp, Artificial Sequence
  synthetic sequence
ctgcttagaacgg

SEQ ID NO: 11353 - DNA, 13 bp, Artificial Sequence
  synthetic sequence
agttctctcgtca

SEQ ID NO: 11354 - DNA, 13 bp, Artificial Sequence
  synthetic sequence
ttgatggaccacg

SEQ ID NO: 11355 - DNA, 13 bp, Artificial Sequence
  synthetic sequence
aagcccacaacga

SEQ ID NO: 11356 - DNA, 13 bp, Artificial Sequence
  synthetic sequence
ggaggctggtaac

SEQ ID NO: 11357 - DNA, 13 bp, Artificial Sequence
  synthetic sequence
aatggccatgacc

SEQ ID NO: 11358 - DNA, 13 bp, Artificial Sequence
  synthetic sequence
tacgctctcaaca

SEQ ID NO: 11359 - DNA, 13 bp, Artificial Sequence
  synthetic sequence
ttctctaccgcct

SEQ ID NO: 11360 - DNA, 13 bp, Artificial Sequence
  synthetic sequence
tgagggctctata

SEQ ID NO: 11361 - DNA, 13 bp, Artificial Sequence
  synthetic sequence
acttggaaaatga

SEQ ID NO: 11362 - DNA, 13 bp, Artificial Sequence
  synthetic sequence
cacaaccggagag

SEQ ID NO: 11363 - DNA, 13 bp, Artificial Sequence
  synthetic sequence
cagaggcactcag

SEQ ID NO: 11364 - DNA, 13 bp, Artificial Sequence
  synthetic sequence
ccatcctagagga

SEQ ID NO: 11365 - DNA, 13 bp, Artificial Sequence
  synthetic sequence
ctgatgaccatca

SEQ ID NO: 11366 - DNA, 13 bp, Artificial Sequence
  synthetic sequence
aatgtgcatgtgg

SEQ ID NO: 11367 - DNA, 13 bp, Artificial Sequence
  synthetic sequence
caatcgccctggc

SEQ ID NO: 11368 - DNA, 13 bp, Artificial Sequence
  synthetic sequence
accatttgcgagg

SEQ ID NO: 11369 - DNA, 13 bp, Artificial Sequence
  synthetic sequence
cttacatgcccaa

SEQ ID NO: 11370 - DNA, 13 bp, Artificial Sequence
  synthetic sequence
gaccgtcaagagg

SEQ ID NO: 11371 - DNA, 13 bp, Artificial Sequence
  synthetic sequence
ccccaaataatca

SEQ ID NO: 11372 - DNA, 13 bp, Artificial Sequence
  synthetic sequence
gcagatcaccaag

SEQ ID NO: 11373 - DNA, 13 bp, Artificial Sequence
  synthetic sequence
aagagaatccaga

SEQ ID NO: 11374 - DNA, 13 bp, Artificial Sequence
  synthetic sequence
ctttgtgggacaa

SEQ ID NO: 11375 - DNA, 13 bp, Artificial Sequence
  synthetic sequence
tgacgccatactg

SEQ ID NO: 11376 - DNA, 13 bp, Artificial Sequence
  synthetic sequence
cagaaccggaaaa

SEQ ID NO: 11377 - DNA, 13 bp, Artificial Sequence
  synthetic sequence
agactaatgtcac

SEQ ID NO: 11378 - DNA, 13 bp, Artificial Sequence
  synthetic sequence
tctggtccatagg

SEQ ID NO: 11379 - DNA, 13 bp, Artificial Sequence
  synthetic sequence
cagggctagacgt

SEQ ID NO: 11380 - DNA, 13 bp, Artificial Sequence
  synthetic sequence
attgcccagggac

SEQ ID NO: 11381 - DNA, 13 bp, Artificial Sequence
  synthetic sequence
acagggaatggtt

SEQ ID NO: 11382 - DNA, 13 bp, Artificial Sequence
  synthetic sequence
ggacgtccgcatg

SEQ ID NO: 11383 - DNA, 13 bp, Artificial Sequence
  synthetic sequence
ttgcttggactct

SEQ ID NO: 11384 - DNA, 13 bp, Artificial Sequence
  synthetic sequence
ctcacaagctggc

SEQ ID NO: 11385 - DNA, 13 bp, Artificial Sequence
  synthetic sequence
acgtatgaatgtc

SEQ ID NO: 11386 - DNA, 13 bp, Artificial Sequence
  synthetic sequence
catgtgcaaaatt

SEQ ID NO: 11387 - DNA, 13 bp, Artificial Sequence
  synthetic sequence
aatggaaggaaaa

SEQ ID NO: 11388 - DNA, 13 bp, Artificial Sequence
  synthetic sequence
tgcgtatgtcttg

SEQ ID NO: 11389 - DNA, 13 bp, Artificial Sequence
  synthetic sequence
aggtctggaacag

SEQ ID NO: 11390 - DNA, 13 bp, Artificial Sequence
  synthetic sequence
caaagagcgggga

SEQ ID NO: 11391 - DNA, 13 bp, Artificial Sequence
  synthetic sequence
gtagaaaagtaga

SEQ ID NO: 11392 - DNA, 13 bp, Artificial Sequence
  synthetic sequence
agctaccttcttc

SEQ ID NO: 11393 - DNA, 13 bp, Artificial Sequence
  synthetic sequence
ctttgagagggct

SEQ ID NO: 11394 - DNA, 13 bp, Artificial Sequence
  synthetic sequence
tcacaagaaaaga

SEQ ID NO: 11395 - DNA, 13 bp, Artificial Sequence
  synthetic sequence
tgcgtccagccac

SEQ ID NO: 11396 - DNA, 13 bp, Artificial Sequence
  synthetic sequence
atacatcctccgt

SEQ ID NO: 11397 - DNA, 13 bp, Artificial Sequence
  synthetic sequence
ctcaaagagaatg

SEQ ID NO: 11398 - DNA, 13 bp, Artificial Sequence
  synthetic sequence
acgtccaatatgg

SEQ ID NO: 11399 - DNA, 13 bp, Artificial Sequence
  synthetic sequence
gacgagtgtgatg

SEQ ID NO: 11400 - DNA, 13 bp, Artificial Sequence
  synthetic sequence
ctagaattaccag

SEQ ID NO: 11401 - DNA, 13 bp, Artificial Sequence
  synthetic sequence
ctgtccagctcgt

SEQ ID NO: 11402 - DNA, 13 bp, Artificial Sequence
  synthetic sequence
ggaaggctgcagt

SEQ ID NO: 11403 - DNA, 13 bp, Artificial Sequence
  synthetic sequence
gatcacaggttga

SEQ ID NO: 11404 - DNA, 13 bp, Artificial Sequence
  synthetic sequence
tggaggacaacac

SEQ ID NO: 11405 - DNA, 13 bp, Artificial Sequence
  synthetic sequence
ccgttgttgctct

SEQ ID NO: 11406 - DNA, 13 bp, Artificial Sequence
  synthetic sequence
aggctcaatcatg

SEQ ID NO: 11407 - DNA, 13 bp, Artificial Sequence
  synthetic sequence
tatggaccagaga

SEQ ID NO: 11408 - DNA, 13 bp, Artificial Sequence
  synthetic sequence
tagcgaagatcgt

SEQ ID NO: 11409 - DNA, 13 bp, Artificial Sequence
  synthetic sequence
caggaggtgtgct

SEQ ID NO: 11410 - DNA, 13 bp, Artificial Sequence
  synthetic sequence
actcctacatcgt

SEQ ID NO: 11411 - DNA, 13 bp, Artificial Sequence
  synthetic sequence
cagaagcttacac

SEQ ID NO: 11412 - DNA, 13 bp, Artificial Sequence
  synthetic sequence
agctttagacacc

SEQ ID NO: 11413 - DNA, 13 bp, Artificial Sequence
  synthetic sequence
gagtttttgtcgg

SEQ ID NO: 11414 - DNA, 13 bp, Artificial Sequence
  synthetic sequence
ccaaagcagatct

SEQ ID NO: 11415 - DNA, 13 bp, Artificial Sequence
  synthetic sequence
cttagaactgctt

SEQ ID NO: 11416 - DNA, 13 bp, Artificial Sequence
  synthetic sequence
acaggcataaagt

SEQ ID NO: 11417 - DNA, 13 bp, Artificial Sequence
  synthetic sequence
tggtgccttcaga

SEQ ID NO: 11418 - DNA, 13 bp, Artificial Sequence
  synthetic sequence
gactacatgacct

SEQ ID NO: 11419 - DNA, 13 bp, Artificial Sequence
  synthetic sequence
attaaggacgcta

SEQ ID NO: 11420 - DNA, 13 bp, Artificial Sequence
  synthetic sequence
gcagtcggaggct

SEQ ID NO: 11421 - DNA, 13 bp, Artificial Sequence
  synthetic sequence
gaggatacattgc

SEQ ID NO: 11422 - DNA, 13 bp, Artificial Sequence
  synthetic sequence
aaaagaaaggagc

SEQ ID NO: 11423 - DNA, 13 bp, Artificial Sequence
  synthetic sequence
aaatcaccctcac

SEQ ID NO: 11424 - DNA, 13 bp, Artificial Sequence
  synthetic sequence
ccgcccctacgat

SEQ ID NO: 11425 - DNA, 13 bp, Artificial Sequence
  synthetic sequence
ctggagaccgtta

SEQ ID NO: 11426 - DNA, 13 bp, Artificial Sequence
  synthetic sequence
tctccccctgtcc

SEQ ID NO: 11427 - DNA, 13 bp, Artificial Sequence
  synthetic sequence
agaaggacagcgg

SEQ ID NO: 11428 - DNA, 13 bp, Artificial Sequence
  synthetic sequence
aaaagagggggcg

SEQ ID NO: 11429 - DNA, 13 bp, Artificial Sequence
  synthetic sequence
agaagctcacaac

SEQ ID NO: 11430 - DNA, 13 bp, Artificial Sequence
  synthetic sequence
tgggtggacttgg

SEQ ID NO: 11431 - DNA, 13 bp, Artificial Sequence
  synthetic sequence
aaaaatccggcgg

SEQ ID NO: 11432 - DNA, 13 bp, Artificial Sequence
  synthetic sequence
gagaagtttgaaa

SEQ ID NO: 11433 - DNA, 13 bp, Artificial Sequence
  synthetic sequence
agaatggggactg

SEQ ID NO: 11434 - DNA, 13 bp, Artificial Sequence
  synthetic sequence
gagaatgtttttc

SEQ ID NO: 11435 - DNA, 13 bp, Artificial Sequence
  synthetic sequence
cttgctgaagtca

SEQ ID NO: 11436 - DNA, 13 bp, Artificial Sequence
  synthetic sequence
atgaacatgctta

SEQ ID NO: 11437 - DNA, 13 bp, Artificial Sequence
  synthetic sequence
ctccacttcctca

SEQ ID NO: 11438 - DNA, 13 bp, Artificial Sequence
  synthetic sequence
acctttttcctat

SEQ ID NO: 11439 - DNA, 13 bp, Artificial Sequence
  synthetic sequence
cttggaaacccat

SEQ ID NO: 11440 - DNA, 13 bp, Artificial Sequence
  synthetic sequence
cctagattccaat

SEQ ID NO: 11441 - DNA, 13 bp, Artificial Sequence
  synthetic sequence
cagaagcttaaag

SEQ ID NO: 11442 - DNA, 13 bp, Artificial Sequence
  synthetic sequence
cttgcgtcttatg

SEQ ID NO: 11443 - DNA, 13 bp, Artificial Sequence
  synthetic sequence
agacgaggtgtaa

SEQ ID NO: 11444 - DNA, 13 bp, Artificial Sequence
  synthetic sequence
tgcaggctaaaaa

SEQ ID NO: 11445 - DNA, 13 bp, Artificial Sequence
  synthetic sequence
tggcttagtatcg

SEQ ID NO: 11446 - DNA, 13 bp, Artificial Sequence
  synthetic sequence
tgtgggcgtggag

SEQ ID NO: 11447 - DNA, 13 bp, Artificial Sequence
  synthetic sequence
tgtgccactccgc

SEQ ID NO: 11448 - DNA, 13 bp, Artificial Sequence
  synthetic sequence
ctcagtgtggtgg

SEQ ID NO: 11449 - DNA, 13 bp, Artificial Sequence
  synthetic sequence
atcctgaatgccg

SEQ ID NO: 11450 - DNA, 13 bp, Artificial Sequence
  synthetic sequence
tggctcagccagc

SEQ ID NO: 11451 - DNA, 13 bp, Artificial Sequence
  synthetic sequence
cattggagaccat

SEQ ID NO: 11452 - DNA, 13 bp, Artificial Sequence
  synthetic sequence
acgaatgtcctaa

SEQ ID NO: 11453 - DNA, 13 bp, Artificial Sequence
  synthetic sequence
tttcctcaacgca

SEQ ID NO: 11454 - DNA, 13 bp, Artificial Sequence
  synthetic sequence
ccttatgaaaaca

SEQ ID NO: 11455 - DNA, 13 bp, Artificial Sequence
  synthetic sequence
cggcgctctgtgc

SEQ ID NO: 11456 - DNA, 13 bp, Artificial Sequence
  synthetic sequence
gggaatacgcggg

SEQ ID NO: 11457 - DNA, 13 bp, Artificial Sequence
  synthetic sequence
gggtctcctctaa

SEQ ID NO: 11458 - DNA, 13 bp, Artificial Sequence
  synthetic sequence
gctggcctgactc

SEQ ID NO: 11459 - DNA, 13 bp, Artificial Sequence
  synthetic sequence
tcaatatgctgtt

SEQ ID NO: 11460 - DNA, 13 bp, Artificial Sequence
  synthetic sequence
tccattcattttc

SEQ ID NO: 11461 - DNA, 13 bp, Artificial Sequence
  synthetic sequence
aggtctgatttcc

SEQ ID NO: 11462 - DNA, 13 bp, Artificial Sequence
  synthetic sequence
aacttgaagaacg

SEQ ID NO: 11463 - DNA, 13 bp, Artificial Sequence
  synthetic sequence
ccttgtgtgatcc

SEQ ID NO: 11464 - DNA, 13 bp, Artificial Sequence
  synthetic sequence
tgcggtgttcacc

SEQ ID NO: 11465 - DNA, 13 bp, Artificial Sequence
  synthetic sequence
cccccaagcatca

SEQ ID NO: 11466 - DNA, 13 bp, Artificial Sequence
  synthetic sequence
ggctggtcatgtt

SEQ ID NO: 11467 - DNA, 13 bp, Artificial Sequence
  synthetic sequence
ctcggctcagcca

SEQ ID NO: 11468 - DNA, 13 bp, Artificial Sequence
  synthetic sequence
tgcggtccacctc

SEQ ID NO: 11469 - DNA, 13 bp, Artificial Sequence
  synthetic sequence
agccatctcggct

SEQ ID NO: 11470 - DNA, 13 bp, Artificial Sequence
  synthetic sequence
ttctctgtttctc

SEQ ID NO: 11471 - DNA, 13 bp, Artificial Sequence
  synthetic sequence
tcctgggtggcca

SEQ ID NO: 11472 - DNA, 13 bp, Artificial Sequence
  synthetic sequence
gtggcgaccattc

SEQ ID NO: 11473 - DNA, 13 bp, Artificial Sequence
  synthetic sequence
ttgcctctgtcca

SEQ ID NO: 11474 - DNA, 13 bp, Artificial Sequence
  synthetic sequence
gctggttggatct

SEQ ID NO: 11475 - DNA, 13 bp, Artificial Sequence
  synthetic sequence
ccccgcttgttca

SEQ ID NO: 11476 - DNA, 13 bp, Artificial Sequence
  synthetic sequence
ctggggctgcgca

SEQ ID NO: 11477 - DNA, 13 bp, Artificial Sequence
  synthetic sequence
cccacggtcatga

SEQ ID NO: 11478 - DNA, 13 bp, Artificial Sequence
  synthetic sequence
cttccgagacggt

SEQ ID NO: 11479 - DNA, 13 bp, Artificial Sequence
  synthetic sequence
cacgatggctcct

SEQ ID NO: 11480 - DNA, 13 bp, Artificial Sequence
  synthetic sequence
gcatgcacattgg

SEQ ID NO: 11481 - DNA, 13 bp, Artificial Sequence
  synthetic sequence
gatatcacgtcca

SEQ ID NO: 11482 - DNA, 13 bp, Artificial Sequence
  synthetic sequence
tcagcctccatca

SEQ ID NO: 11483 - DNA, 13 bp, Artificial Sequence
  synthetic sequence
tgtcagtgactga

SEQ ID NO: 11484 - DNA, 13 bp, Artificial Sequence
  synthetic sequence
gggttgatgtgat

SEQ ID NO: 11485 - DNA, 13 bp, Artificial Sequence
  synthetic sequence
gaaggcttccatt

SEQ ID NO: 11486 - DNA, 13 bp, Artificial Sequence
  synthetic sequence
ggaacctctgccg

SEQ ID NO: 11487 - DNA, 13 bp, Artificial Sequence
  synthetic sequence
gtccctggttttg

SEQ ID NO: 11488 - DNA, 13 bp, Artificial Sequence
  synthetic sequence
cgatggaagtata

SEQ ID NO: 11489 - DNA, 13 bp, Artificial Sequence
  synthetic sequence
tattctgtgtcat

SEQ ID NO: 11490 - DNA, 13 bp, Artificial Sequence
  synthetic sequence
tagttgtgtgcca

SEQ ID NO: 11491 - DNA, 13 bp, Artificial Sequence
  synthetic sequence
gtggtggaattcc

SEQ ID NO: 11492 - DNA, 13 bp, Artificial Sequence
  synthetic sequence
cagggagcatgta

SEQ ID NO: 11493 - DNA, 13 bp, Artificial Sequence
  synthetic sequence
ctgatcgccatcc

SEQ ID NO: 11494 - DNA, 13 bp, Artificial Sequence
  synthetic sequence
ccattagtccggc

SEQ ID NO: 11495 - DNA, 13 bp, Artificial Sequence
  synthetic sequence
atgaccctgctcg

SEQ ID NO: 11496 - DNA, 13 bp, Artificial Sequence
  synthetic sequence
tttgtcgtttgcc

SEQ ID NO: 11497 - DNA, 13 bp, Artificial Sequence
  synthetic sequence
gcgtgcttccagc

SEQ ID NO: 11498 - DNA, 13 bp, Artificial Sequence
  synthetic sequence
ccacctttcgtgt

SEQ ID NO: 11499 - DNA, 13 bp, Artificial Sequence
  synthetic sequence
atggcaaacatca

SEQ ID NO: 11500 - DNA, 13 bp, Artificial Sequence
  synthetic sequence
gcacaagcggggt

SEQ ID NO: 11501 - DNA, 13 bp, Artificial Sequence
  synthetic sequence
tctcaatccagta

SEQ ID NO: 11502 - DNA, 13 bp, Artificial Sequence
  synthetic sequence
accagcacctttg

SEQ ID NO: 11503 - DNA, 13 bp, Artificial Sequence
  synthetic sequence
gcacctctatgaa

SEQ ID NO: 11504 - DNA, 13 bp, Artificial Sequence
  synthetic sequence
caatcaagtgaaa

SEQ ID NO: 11505 - DNA, 13 bp, Artificial Sequence
  synthetic sequence
cacctctgagacg

SEQ ID NO: 11506 - DNA, 13 bp, Artificial Sequence
  synthetic sequence
ctctccttttgag

SEQ ID NO: 11507 - DNA, 13 bp, Artificial Sequence
  synthetic sequence
gtgtactgaatgc

SEQ ID NO: 11508 - DNA, 13 bp, Artificial Sequence
  synthetic sequence
tagatgttctcag

SEQ ID NO: 11509 - DNA, 13 bp, Artificial Sequence
  synthetic sequence
tcatctgtctctt

SEQ ID NO: 11510 - DNA, 13 bp, Artificial Sequence
  synthetic sequence
caactccattgcc

SEQ ID NO: 11511 - DNA, 13 bp, Artificial Sequence
  synthetic sequence
aaggcacgcctcg

SEQ ID NO: 11512 - DNA, 13 bp, Artificial Sequence
  synthetic sequence
ccattcccagaca

SEQ ID NO: 11513 - DNA, 13 bp, Artificial Sequence
  synthetic sequence
aagactggcatgg

SEQ ID NO: 11514 - DNA, 13 bp, Artificial Sequence
  synthetic sequence
cctataccctttc

SEQ ID NO: 11515 - DNA, 13 bp, Artificial Sequence
  synthetic sequence
gccaggaaagcat

SEQ ID NO: 11516 - DNA, 13 bp, Artificial Sequence
  synthetic sequence
tcagagccagttt

SEQ ID NO: 11517 - DNA, 13 bp, Artificial Sequence
  synthetic sequence
tctgctgctacca

SEQ ID NO: 11518 - DNA, 13 bp, Artificial Sequence
  synthetic sequence
caatcggaatttt

SEQ ID NO: 11519 - DNA, 13 bp, Artificial Sequence
  synthetic sequence
caaacatgctctt

SEQ ID NO: 11520 - DNA, 13 bp, Artificial Sequence
  synthetic sequence
cctatggagttga

SEQ ID NO: 11521 - DNA, 13 bp, Artificial Sequence
  synthetic sequence
aaagcggcgggaa

SEQ ID NO: 11522 - DNA, 13 bp, Artificial Sequence
  synthetic sequence
ctttccactgtca

SEQ ID NO: 11523 - DNA, 13 bp, Artificial Sequence
  synthetic sequence
cggtatggatgct

SEQ ID NO: 11524 - DNA, 13 bp, Artificial Sequence
  synthetic sequence
ctctgcacgggac

SEQ ID NO: 11525 - DNA, 13 bp, Artificial Sequence
  synthetic sequence
cactggttatggg

SEQ ID NO: 11526 - DNA, 13 bp, Artificial Sequence
  synthetic sequence
aagccttgtttgc

SEQ ID NO: 11527 - DNA, 13 bp, Artificial Sequence
  synthetic sequence
gatccattcgtat

SEQ ID NO: 11528 - DNA, 13 bp, Artificial Sequence
  synthetic sequence
gtttgctcatgag

SEQ ID NO: 11529 - DNA, 13 bp, Artificial Sequence
  synthetic sequence
ttggcgagacaaa

SEQ ID NO: 11530 - DNA, 13 bp, Artificial Sequence
  synthetic sequence
atctgttccattc

SEQ ID NO: 11531 - DNA, 13 bp, Artificial Sequence
  synthetic sequence
gggcgtttctggc

SEQ ID NO: 11532 - DNA, 13 bp, Artificial Sequence
  synthetic sequence
gctgagcgatatc

SEQ ID NO: 11533 - DNA, 13 bp, Artificial Sequence
  synthetic sequence
tctccctttccca

SEQ ID NO: 11534 - DNA, 13 bp, Artificial Sequence
  synthetic sequence
ccaacctccccga

SEQ ID NO: 11535 - DNA, 13 bp, Artificial Sequence
  synthetic sequence
agaggggttagca

SEQ ID NO: 11536 - DNA, 13 bp, Artificial Sequence
  synthetic sequence
agtcagatgtcat

SEQ ID NO: 11537 - DNA, 13 bp, Artificial Sequence
  synthetic sequence
ccactatttcatt

SEQ ID NO: 11538 - DNA, 13 bp, Artificial Sequence
  synthetic sequence
gaactctccccat

SEQ ID NO: 11539 - DNA, 13 bp, Artificial Sequence
  synthetic sequence
tcgagagccattc

SEQ ID NO: 11540 - DNA, 13 bp, Artificial Sequence
  synthetic sequence
ttttctggctgga

SEQ ID NO: 11541 - DNA, 13 bp, Artificial Sequence
  synthetic sequence
tggttgtcacacc

SEQ ID NO: 11542 - DNA, 13 bp, Artificial Sequence
  synthetic sequence
ctccttgctttcc

SEQ ID NO: 11543 - DNA, 13 bp, Artificial Sequence
  synthetic sequence
aaatccctatgac

SEQ ID NO: 11544 - DNA, 13 bp, Artificial Sequence
  synthetic sequence
acggcttcccaca

SEQ ID NO: 11545 - DNA, 13 bp, Artificial Sequence
  synthetic sequence
aatccctctagcc

SEQ ID NO: 11546 - DNA, 13 bp, Artificial Sequence
  synthetic sequence
ttgcttttcctga

SEQ ID NO: 11547 - DNA, 13 bp, Artificial Sequence
  synthetic sequence
ttgtctcaggtcc

SEQ ID NO: 11548 - DNA, 13 bp, Artificial Sequence
  synthetic sequence
tctcctttcgagt

SEQ ID NO: 11549 - DNA, 13 bp, Artificial Sequence
  synthetic sequence
tgagcttcatcca

SEQ ID NO: 11550 - DNA, 13 bp, Artificial Sequence
  synthetic sequence
actagatgaccct

SEQ ID NO: 11551 - DNA, 13 bp, Artificial Sequence
  synthetic sequence
gagccttcgtgtc

SEQ ID NO: 11552 - DNA, 13 bp, Artificial Sequence
  synthetic sequence
actagcccacctc

SEQ ID NO: 11553 - DNA, 13 bp, Artificial Sequence
  synthetic sequence
atctcccaaaacc

SEQ ID NO: 11554 - DNA, 13 bp, Artificial Sequence
  synthetic sequence
ccacggtcaagac

SEQ ID NO: 11555 - DNA, 13 bp, Artificial Sequence
  synthetic sequence
gtgtctctggcca

SEQ ID NO: 11556 - DNA, 13 bp, Artificial Sequence
  synthetic sequence
aaggcagccccta

SEQ ID NO: 11557 - DNA, 13 bp, Artificial Sequence
  synthetic sequence
ggccttccccttt

SEQ ID NO: 11558 - DNA, 13 bp, Artificial Sequence
  synthetic sequence
ttgccgcctggga

SEQ ID NO: 11559 - DNA, 13 bp, Artificial Sequence
  synthetic sequence
ccgtggttccagg

SEQ ID NO: 11560 - DNA, 13 bp, Artificial Sequence
  synthetic sequence
ccactccactctt

SEQ ID NO: 11561 - DNA, 13 bp, Artificial Sequence
  synthetic sequence
tgacgaggaacgc

SEQ ID NO: 11562 - DNA, 13 bp, Artificial Sequence
  synthetic sequence
gacaacttcatgg

SEQ ID NO: 11563 - DNA, 13 bp, Artificial Sequence
  synthetic sequence
ggttgacgagaaa

SEQ ID NO: 11564 - DNA, 13 bp, Artificial Sequence
  synthetic sequence
ccttttgaggtgg

SEQ ID NO: 11565 - DNA, 13 bp, Artificial Sequence
  synthetic sequence
ccatctcccagaa

SEQ ID NO: 11566 - DNA, 13 bp, Artificial Sequence
  synthetic sequence
cctctcttgcagc

SEQ ID NO: 11567 - DNA, 13 bp, Artificial Sequence
  synthetic sequence
cagataagaaaca

SEQ ID NO: 11568 - DNA, 13 bp, Artificial Sequence
  synthetic sequence
gtacttgatgttc

SEQ ID NO: 11569 - DNA, 13 bp, Artificial Sequence
  synthetic sequence
ttccatcttttct

SEQ ID NO: 11570 - DNA, 13 bp, Artificial Sequence
  synthetic sequence
gctggtggctcag

SEQ ID NO: 11571 - DNA, 13 bp, Artificial Sequence
  synthetic sequence
aactcctgtggtg

SEQ ID NO: 11572 - DNA, 13 bp, Artificial Sequence
  synthetic sequence
aaagagtgtgtgt

SEQ ID NO: 11573 - DNA, 13 bp, Artificial Sequence
  synthetic sequence
tgtacctatctac

SEQ ID NO: 11574 - DNA, 13 bp, Artificial Sequence
  synthetic sequence
tcatcggcataca

SEQ ID NO: 11575 - DNA, 13 bp, Artificial Sequence
  synthetic sequence
ttgtctcgggtcc

SEQ ID NO: 11576 - DNA, 13 bp, Artificial Sequence
  synthetic sequence
tcagctgttgcca

SEQ ID NO: 11577 - DNA, 13 bp, Artificial Sequence
  synthetic sequence
cacagattcccac

SEQ ID NO: 11578 - DNA, 13 bp, Artificial Sequence
  synthetic sequence
acaactgtgctcc

SEQ ID NO: 11579 - DNA, 13 bp, Artificial Sequence
  synthetic sequence
ccttccccacagc

SEQ ID NO: 11580 - DNA, 13 bp, Artificial Sequence
  synthetic sequence
ttgctgcttgaga

SEQ ID NO: 11581 - DNA, 13 bp, Artificial Sequence
  synthetic sequence
ctaaatgaccctg

SEQ ID NO: 11582 - DNA, 13 bp, Artificial Sequence
  synthetic sequence
gcagcccggtcca

SEQ ID NO: 11583 - DNA, 13 bp, Artificial Sequence
  synthetic sequence
gaagctagttgga

SEQ ID NO: 11584 - DNA, 13 bp, Artificial Sequence
  synthetic sequence
ttccccatgcgtt

SEQ ID NO: 11585 - DNA, 13 bp, Artificial Sequence
  synthetic sequence
cttcatggctccg

SEQ ID NO: 11586 - DNA, 13 bp, Artificial Sequence
  synthetic sequence
tcagtgaagtgag

SEQ ID NO: 11587 - DNA, 13 bp, Artificial Sequence
  synthetic sequence
ggcttgtcagcgt

SEQ ID NO: 11588 - DNA, 13 bp, Artificial Sequence
  synthetic sequence
gcacattacgtct

SEQ ID NO: 11589 - DNA, 13 bp, Artificial Sequence
  synthetic sequence
cagtccacgtctt

SEQ ID NO: 11590 - DNA, 13 bp, Artificial Sequence
  synthetic sequence
cgtagtgtgcgtt

SEQ ID NO: 11591 - DNA, 13 bp, Artificial Sequence
  synthetic sequence
gtcatggataggc

SEQ ID NO: 11592 - DNA, 13 bp, Artificial Sequence
  synthetic sequence
gatcaaacctcca

SEQ ID NO: 11593 - DNA, 13 bp, Artificial Sequence
  synthetic sequence
tccgagggtttgt

SEQ ID NO: 11594 - DNA, 13 bp, Artificial Sequence
  synthetic sequence
gggtaatccagac

SEQ ID NO: 11595 - DNA, 13 bp, Artificial Sequence
  synthetic sequence
gagttttgctgag

SEQ ID NO: 11596 - DNA, 13 bp, Artificial Sequence
  synthetic sequence
gcttcaccactcc

SEQ ID NO: 11597 - DNA, 13 bp, Artificial Sequence
  synthetic sequence
cgcatattctgtg

SEQ ID NO: 11598 - DNA, 13 bp, Artificial Sequence
  synthetic sequence
gtgccacgttgtg

SEQ ID NO: 11599 - DNA, 13 bp, Artificial Sequence
  synthetic sequence
gtagtggttctga

SEQ ID NO: 11600 - DNA, 13 bp, Artificial Sequence
  synthetic sequence
ccccacccacgat

SEQ ID NO: 11601 - DNA, 13 bp, Artificial Sequence
  synthetic sequence
tgcgctggttatg

SEQ ID NO: 11602 - DNA, 13 bp, Artificial Sequence
  synthetic sequence
ctttccgccgaac

SEQ ID NO: 11603 - DNA, 13 bp, Artificial Sequence
  synthetic sequence
aggttgtgccttt

SEQ ID NO: 11604 - DNA, 13 bp, Artificial Sequence
  synthetic sequence
ctcatcctgtcct

SEQ ID NO: 11605 - DNA, 13 bp, Artificial Sequence
  synthetic sequence
catcactcccaga

SEQ ID NO: 11606 - DNA, 13 bp, Artificial Sequence
  synthetic sequence
ctgtaagccggag

SEQ ID NO: 11607 - DNA, 13 bp, Artificial Sequence
  synthetic sequence
tatgatccagttc

SEQ ID NO: 11608 - DNA, 13 bp, Artificial Sequence
  synthetic sequence
gagccaaagtccc

SEQ ID NO: 11609 - DNA, 13 bp, Artificial Sequence
  synthetic sequence
ccccattgccata

SEQ ID NO: 11610 - DNA, 13 bp, Artificial Sequence
  synthetic sequence
cgcgtcggtgcca

SEQ ID NO: 11611 - DNA, 13 bp, Artificial Sequence
  synthetic sequence
tcaagtctaggtc

SEQ ID NO: 11612 - DNA, 13 bp, Artificial Sequence
  synthetic sequence
atcctcctgtcat

SEQ ID NO: 11613 - DNA, 13 bp, Artificial Sequence
  synthetic sequence
ggaaatttgacaa

SEQ ID NO: 11614 - DNA, 13 bp, Artificial Sequence
  synthetic sequence
gccaccttgtagg

SEQ ID NO: 11615 - DNA, 13 bp, Artificial Sequence
  synthetic sequence
ctggtttatcgcc

SEQ ID NO: 11616 - DNA, 13 bp, Artificial Sequence
  synthetic sequence
tttgtaaaacacg

SEQ ID NO: 11617 - DNA, 13 bp, Artificial Sequence
  synthetic sequence
cctctatgaagct

SEQ ID NO: 11618 - DNA, 13 bp, Artificial Sequence
  synthetic sequence
cgggatcatcaat

SEQ ID NO: 11619 - DNA, 13 bp, Artificial Sequence
  synthetic sequence
aacttcattgctc

SEQ ID NO: 11620 - DNA, 13 bp, Artificial Sequence
  synthetic sequence
acagtggtgacat

SEQ ID NO: 11621 - DNA, 13 bp, Artificial Sequence
  synthetic sequence
tggaagtcgcgac

SEQ ID NO: 11622 - DNA, 13 bp, Artificial Sequence
  synthetic sequence
atggtgacggagg

SEQ ID NO: 11623 - DNA, 13 bp, Artificial Sequence
  synthetic sequence
ccatccattgtga

SEQ ID NO: 11624 - DNA, 13 bp, Artificial Sequence
  synthetic sequence
acgacaagtcact

SEQ ID NO: 11625 - DNA, 13 bp, Artificial Sequence
  synthetic sequence
gtgttactgtaaa

SEQ ID NO: 11626 - DNA, 13 bp, Artificial Sequence
  synthetic sequence
gtgcaaatctagc

SEQ ID NO: 11627 - DNA, 13 bp, Artificial Sequence
  synthetic sequence
ctatctccttcta

SEQ ID NO: 11628 - DNA, 13 bp, Artificial Sequence
  synthetic sequence
gagtgagccaata

SEQ ID NO: 11629 - DNA, 13 bp, Artificial Sequence
  synthetic sequence
tgacttcctggac

SEQ ID NO: 11630 - DNA, 13 bp, Artificial Sequence
  synthetic sequence
agctacatacttc

SEQ ID NO: 11631 - DNA, 13 bp, Artificial Sequence
  synthetic sequence
ttgggtattctgt

SEQ ID NO: 11632 - DNA, 13 bp, Artificial Sequence
  synthetic sequence
tcgccagaaccat

SEQ ID NO: 11633 - DNA, 13 bp, Artificial Sequence
  synthetic sequence
tctgttctctcct

SEQ ID NO: 11634 - DNA, 13 bp, Artificial Sequence
  synthetic sequence
aaaaggccttgcc

SEQ ID NO: 11635 - DNA, 13 bp, Artificial Sequence
  synthetic sequence
gtagttccaggcg

SEQ ID NO: 11636 - DNA, 13 bp, Artificial Sequence
  synthetic sequence
caaaccacctacg

SEQ ID NO: 11637 - DNA, 13 bp, Artificial Sequence
  synthetic sequence
gcccctaggacca

SEQ ID NO: 11638 - DNA, 13 bp, Artificial Sequence
  synthetic sequence
catatctgttgct

SEQ ID NO: 11639 - DNA, 13 bp, Artificial Sequence
  synthetic sequence
agtcgtctccgct

SEQ ID NO: 11640 - DNA, 13 bp, Artificial Sequence
  synthetic sequence
tttcttcaacacc

SEQ ID NO: 11641 - DNA, 13 bp, Artificial Sequence
  synthetic sequence
ctattttggttcc

SEQ ID NO: 11642 - DNA, 13 bp, Artificial Sequence
  synthetic sequence
ccccgtagcggtg

SEQ ID NO: 11643 - DNA, 13 bp, Artificial Sequence
  synthetic sequence
gccagccatgcga

SEQ ID NO: 11644 - DNA, 13 bp, Artificial Sequence
  synthetic sequence
acacgagttgatg

SEQ ID NO: 11645 - DNA, 13 bp, Artificial Sequence
  synthetic sequence
atgtgatcgctcg

SEQ ID NO: 11646 - DNA, 13 bp, Artificial Sequence
  synthetic sequence
ccagcacagtcat

SEQ ID NO: 11647 - DNA, 13 bp, Artificial Sequence
  synthetic sequence
gggtcggtgaagt

SEQ ID NO: 11648 - DNA, 13 bp, Artificial Sequence
  synthetic sequence
gaagtataggagt

SEQ ID NO: 11649 - DNA, 13 bp, Artificial Sequence
  synthetic sequence
ttcaaggagggct

SEQ ID NO: 11650 - DNA, 13 bp, Artificial Sequence
  synthetic sequence
ctggttgtgtgcc

SEQ ID NO: 11651 - DNA, 13 bp, Artificial Sequence
  synthetic sequence
tctgcagtcaatg

SEQ ID NO: 11652 - DNA, 13 bp, Artificial Sequence
  synthetic sequence
tgcagaccattag

SEQ ID NO: 11653 - DNA, 13 bp, Artificial Sequence
  synthetic sequence
ggggtgcgaaaca

SEQ ID NO: 11654 - DNA, 13 bp, Artificial Sequence
  synthetic sequence
tgcagaacttcca

SEQ ID NO: 11655 - DNA, 13 bp, Artificial Sequence
  synthetic sequence
tggtccaatgacc

SEQ ID NO: 11656 - DNA, 13 bp, Artificial Sequence
  synthetic sequence
tatgctccttcca

SEQ ID NO: 11657 - DNA, 13 bp, Artificial Sequence
  synthetic sequence
gtcaatggcacat

SEQ ID NO: 11658 - DNA, 13 bp, Artificial Sequence
  synthetic sequence
gtggagttagcca

SEQ ID NO: 11659 - DNA, 13 bp, Artificial Sequence
  synthetic sequence
atcatcagcgtac

SEQ ID NO: 11660 - DNA, 13 bp, Artificial Sequence
  synthetic sequence
tctcactttctgt

SEQ ID NO: 11661 - DNA, 13 bp, Artificial Sequence
  synthetic sequence
attctcgtcccaa

SEQ ID NO: 11662 - DNA, 13 bp, Artificial Sequence
  synthetic sequence
tcttcgtatctcc

SEQ ID NO: 11663 - DNA, 13 bp, Artificial Sequence
  synthetic sequence
caggatgtcctgc

SEQ ID NO: 11664 - DNA, 13 bp, Artificial Sequence
  synthetic sequence
tgacgtaaaacgc

SEQ ID NO: 11665 - DNA, 13 bp, Artificial Sequence
  synthetic sequence
tgatagcagtaac

SEQ ID NO: 11666 - DNA, 13 bp, Artificial Sequence
  synthetic sequence
cacctgtccactc

SEQ ID NO: 11667 - DNA, 13 bp, Artificial Sequence
  synthetic sequence
gcaggccgcactc

SEQ ID NO: 11668 - DNA, 13 bp, Artificial Sequence
  synthetic sequence
ccaatggagccga

SEQ ID NO: 11669 - DNA, 13 bp, Artificial Sequence
  synthetic sequence
acggcgtcaatga

SEQ ID NO: 11670 - DNA, 13 bp, Artificial Sequence
  synthetic sequence
tccacatcctctg

SEQ ID NO: 11671 - DNA, 13 bp, Artificial Sequence
  synthetic sequence
cacggctgttctc

SEQ ID NO: 11672 - DNA, 13 bp, Artificial Sequence
  synthetic sequence
agcgtcctgcctc

SEQ ID NO: 11673 - DNA, 13 bp, Artificial Sequence
  synthetic sequence
ccagtctagtgac

SEQ ID NO: 11674 - DNA, 13 bp, Artificial Sequence
  synthetic sequence
aggaacactgcca

SEQ ID NO: 11675 - DNA, 13 bp, Artificial Sequence
  synthetic sequence
aacggcactggct

SEQ ID NO: 11676 - DNA, 13 bp, Artificial Sequence
  synthetic sequence
gtagactcctgtg

SEQ ID NO: 11677 - DNA, 13 bp, Artificial Sequence
  synthetic sequence
ataaaattgttga

SEQ ID NO: 11678 - DNA, 13 bp, Artificial Sequence
  synthetic sequence
caacaacagattt

SEQ ID NO: 11679 - DNA, 13 bp, Artificial Sequence
  synthetic sequence
agcaatacattca

SEQ ID NO: 11680 - DNA, 13 bp, Artificial Sequence
  synthetic sequence
taatagatgaatt

SEQ ID NO: 11681 - DNA, 13 bp, Artificial Sequence
  synthetic sequence
agcaattcaagaa

SEQ ID NO: 11682 - DNA, 13 bp, Artificial Sequence
  synthetic sequence
aaatgatatctga

SEQ ID NO: 11683 - DNA, 13 bp, Artificial Sequence
  synthetic sequence
taacaatagttca

SEQ ID NO: 11684 - DNA, 13 bp, Artificial Sequence
  synthetic sequence
aagagatgactag

SEQ ID NO: 11685 - DNA, 13 bp, Artificial Sequence
  synthetic sequence
ttaaagacaatag

SEQ ID NO: 11686 - DNA, 13 bp, Artificial Sequence
  synthetic sequence
gctactatgacta

SEQ ID NO: 11687 - DNA, 13 bp, Artificial Sequence
  synthetic sequence
atgccactagtga

SEQ ID NO: 11688 - DNA, 13 bp, Artificial Sequence
  synthetic sequence
tctagagctataa

SEQ ID NO: 11689 - DNA, 13 bp, Artificial Sequence
  synthetic sequence
taatagacttttc

SEQ ID NO: 11690 - DNA, 13 bp, Artificial Sequence
  synthetic sequence
acatttggatgcc

SEQ ID NO: 11691 - DNA, 13 bp, Artificial Sequence
  synthetic sequence
taccaccatggaa

SEQ ID NO: 11692 - DNA, 13 bp, Artificial Sequence
  synthetic sequence
aaatccaaacata

SEQ ID NO: 11693 - DNA, 13 bp, Artificial Sequence
  synthetic sequence
caaaatctgcaaa

SEQ ID NO: 11694 - DNA, 13 bp, Artificial Sequence
  synthetic sequence
tggacattaatgg

SEQ ID NO: 11695 - DNA, 13 bp, Artificial Sequence
  synthetic sequence
tcttatctgtgtc

SEQ ID NO: 11696 - DNA, 13 bp, Artificial Sequence
  synthetic sequence
gttaagaactgga

SEQ ID NO: 11697 - DNA, 13 bp, Artificial Sequence
  synthetic sequence
aaataaatgcaga

SEQ ID NO: 11698 - DNA, 13 bp, Artificial Sequence
  synthetic sequence
ataaacttcaatc

SEQ ID NO: 11699 - DNA, 13 bp, Artificial Sequence
  synthetic sequence
gatatattttctc

SEQ ID NO: 11700 - DNA, 13 bp, Artificial Sequence
  synthetic sequence
tccctaaatgttt

SEQ ID NO: 11701 - DNA, 13 bp, Artificial Sequence
  synthetic sequence
ataccattgcttt

SEQ ID NO: 11702 - DNA, 13 bp, Artificial Sequence
  synthetic sequence
gatagagagatat

SEQ ID NO: 11703 - DNA, 13 bp, Artificial Sequence
  synthetic sequence
attgattatttcc

SEQ ID NO: 11704 - DNA, 13 bp, Artificial Sequence
  synthetic sequence
ctgcaattatgag

SEQ ID NO: 11705 - DNA, 13 bp, Artificial Sequence
  synthetic sequence
aatgcttgctttg

SEQ ID NO: 11706 - DNA, 13 bp, Artificial Sequence
  synthetic sequence
agatttttgaaga

SEQ ID NO: 11707 - DNA, 13 bp, Artificial Sequence
  synthetic sequence
ttatgggtgagac

SEQ ID NO: 11708 - DNA, 13 bp, Artificial Sequence
  synthetic sequence
aagcaactgtagt

SEQ ID NO: 11709 - DNA, 13 bp, Artificial Sequence
  synthetic sequence
atggttgtccacc

SEQ ID NO: 11710 - DNA, 13 bp, Artificial Sequence
  synthetic sequence
tatatggaatctg

SEQ ID NO: 11711 - DNA, 13 bp, Artificial Sequence
  synthetic sequence
ccatgatggaaca

SEQ ID NO: 11712 - DNA, 13 bp, Artificial Sequence
  synthetic sequence
tcaatatatggca

SEQ ID NO: 11713 - DNA, 13 bp, Artificial Sequence
  synthetic sequence
caattaagacagg

SEQ ID NO: 11714 - DNA, 13 bp, Artificial Sequence
  synthetic sequence
cctatcctctacc

SEQ ID NO: 11715 - DNA, 13 bp, Artificial Sequence
  synthetic sequence
ctatgatgataac

SEQ ID NO: 11716 - DNA, 13 bp, Artificial Sequence
  synthetic sequence
ttttatttcaatg

SEQ ID NO: 11717 - DNA, 13 bp, Artificial Sequence
  synthetic sequence
atataaggaatag

SEQ ID NO: 11718 - DNA, 13 bp, Artificial Sequence
  synthetic sequence
attgtaccaaaca

SEQ ID NO: 11719 - DNA, 13 bp, Artificial Sequence
  synthetic sequence
aggaatgaagagc

SEQ ID NO: 11720 - DNA, 13 bp, Artificial Sequence
  synthetic sequence
caatgtctgtgta

SEQ ID NO: 11721 - DNA, 13 bp, Artificial Sequence
  synthetic sequence
aatgatgtaccat

SEQ ID NO: 11722 - DNA, 13 bp, Artificial Sequence
  synthetic sequence
tatgaagaattct

SEQ ID NO: 11723 - DNA, 13 bp, Artificial Sequence
  synthetic sequence
atagaaatagtta

SEQ ID NO: 11724 - DNA, 13 bp, Artificial Sequence
  synthetic sequence
acagaggcttata

SEQ ID NO: 11725 - DNA, 13 bp, Artificial Sequence
  synthetic sequence
agatttagttcat

SEQ ID NO: 11726 - DNA, 13 bp, Artificial Sequence
  synthetic sequence
taatacatcattc

SEQ ID NO: 11727 - DNA, 13 bp, Artificial Sequence
  synthetic sequence
cttgttttatggg

SEQ ID NO: 11728 - DNA, 13 bp, Artificial Sequence
  synthetic sequence
atactgcaaggga

SEQ ID NO: 11729 - DNA, 13 bp, Artificial Sequence
  synthetic sequence
aggaaaactcctg

SEQ ID NO: 11730 - DNA, 13 bp, Artificial Sequence
  synthetic sequence
aagatgctaataa

SEQ ID NO: 11731 - DNA, 13 bp, Artificial Sequence
  synthetic sequence
atgcaaccttcaa

SEQ ID NO: 11732 - DNA, 13 bp, Artificial Sequence
  synthetic sequence
gaatgattggcaa

SEQ ID NO: 11733 - DNA, 13 bp, Artificial Sequence
  synthetic sequence
actacaaggcaaa

SEQ ID NO: 11734 - DNA, 13 bp, Artificial Sequence
  synthetic sequence
atacttcttgata

SEQ ID NO: 11735 - DNA, 13 bp, Artificial Sequence
  synthetic sequence
aataggaacaatt

SEQ ID NO: 11736 - DNA, 13 bp, Artificial Sequence
  synthetic sequence
ggttatatgagtt

SEQ ID NO: 11737 - DNA, 13 bp, Artificial Sequence
  synthetic sequence
tattcaaacatga

SEQ ID NO: 11738 - DNA, 13 bp, Artificial Sequence
  synthetic sequence
aatatagagtttg

SEQ ID NO: 11739 - DNA, 13 bp, Artificial Sequence
  synthetic sequence
aacagaagaaaat

SEQ ID NO: 11740 - DNA, 13 bp, Artificial Sequence
  synthetic sequence
tttgaagaatctg

SEQ ID NO: 11741 - DNA, 13 bp, Artificial Sequence
  synthetic sequence
tacaaaacttaca

SEQ ID NO: 11742 - DNA, 13 bp, Artificial Sequence
  synthetic sequence
tgatacaccattc

SEQ ID NO: 11743 - DNA, 13 bp, Artificial Sequence
  synthetic sequence
acagaagcttata

SEQ ID NO: 11744 - DNA, 13 bp, Artificial Sequence
  synthetic sequence
tagagaatagaaa

SEQ ID NO: 11745 - DNA, 13 bp, Artificial Sequence
  synthetic sequence
atatagaatttga

SEQ ID NO: 11746 - DNA, 13 bp, Artificial Sequence
  synthetic sequence
catatgacaacat

SEQ ID NO: 11747 - DNA, 13 bp, Artificial Sequence
  synthetic sequence
caacctttaaact

SEQ ID NO: 11748 - DNA, 13 bp, Artificial Sequence
  synthetic sequence
agactacaagaca

SEQ ID NO: 11749 - DNA, 13 bp, Artificial Sequence
  synthetic sequence
ctttagaaaggag

SEQ ID NO: 11750 - DNA, 13 bp, Artificial Sequence
  synthetic sequence
ttaaacatgataa

SEQ ID NO: 11751 - DNA, 13 bp, Artificial Sequence
  synthetic sequence
tagagcccaaaca

SEQ ID NO: 11752 - DNA, 13 bp, Artificial Sequence
  synthetic sequence
atctcgtcatttg

SEQ ID NO: 11753 - DNA, 13 bp, Artificial Sequence
  synthetic sequence
atataaataatgt

SEQ ID NO: 11754 - DNA, 13 bp, Artificial Sequence
  synthetic sequence
tatacttcatgtg

SEQ ID NO: 11755 - DNA, 13 bp, Artificial Sequence
  synthetic sequence
caagacagggctc

SEQ ID NO: 11756 - DNA, 13 bp, Artificial Sequence
  synthetic sequence
agaatatacaatg

SEQ ID NO: 11757 - DNA, 13 bp, Artificial Sequence
  synthetic sequence
cccatgatgataa

SEQ ID NO: 11758 - DNA, 13 bp, Artificial Sequence
  synthetic sequence
aatttgttgagaa

SEQ ID NO: 11759 - DNA, 13 bp, Artificial Sequence
  synthetic sequence
gatggatatcggg

SEQ ID NO: 11760 - DNA, 13 bp, Artificial Sequence
  synthetic sequence
ctcaaaactaatt

SEQ ID NO: 11761 - DNA, 13 bp, Artificial Sequence
  synthetic sequence
agaatgcctgctt

SEQ ID NO: 11762 - DNA, 13 bp, Artificial Sequence
  synthetic sequence
tataattccaaaa

SEQ ID NO: 11763 - DNA, 13 bp, Artificial Sequence
  synthetic sequence
tatggtccacaaa

SEQ ID NO: 11764 - DNA, 13 bp, Artificial Sequence
  synthetic sequence
ttctgacagataa

SEQ ID NO: 11765 - DNA, 13 bp, Artificial Sequence
  synthetic sequence
gtgcaatgtctgt

SEQ ID NO: 11766 - DNA, 13 bp, Artificial Sequence
  synthetic sequence
atgatgtaccgtt

SEQ ID NO: 11767 - DNA, 13 bp, Artificial Sequence
  synthetic sequence
tgcaagagatgca

SEQ ID NO: 11768 - DNA, 13 bp, Artificial Sequence
  synthetic sequence
cactaataagatt

SEQ ID NO: 11769 - DNA, 13 bp, Artificial Sequence
  synthetic sequence
tgagagggaggtc

SEQ ID NO: 11770 - DNA, 13 bp, Artificial Sequence
  synthetic sequence
ctgaaaatataac

SEQ ID NO: 11771 - DNA, 13 bp, Artificial Sequence
  synthetic sequence
gaacaagtatgcc

SEQ ID NO: 11772 - DNA, 13 bp, Artificial Sequence
  synthetic sequence
tgagaagcaccat

SEQ ID NO: 11773 - DNA, 13 bp, Artificial Sequence
  synthetic sequence
agtataatagtat

SEQ ID NO: 11774 - DNA, 13 bp, Artificial Sequence
  synthetic sequence
catgggtatctat

SEQ ID NO: 11775 - DNA, 13 bp, Artificial Sequence
  synthetic sequence
ttgttcacttatt

SEQ ID NO: 11776 - DNA, 13 bp, Artificial Sequence
  synthetic sequence
taagcatcccgat

SEQ ID NO: 11777 - DNA, 13 bp, Artificial Sequence
  synthetic sequence
gatagaaatagtc

SEQ ID NO: 11778 - DNA, 13 bp, Artificial Sequence
  synthetic sequence
tctaactaggaaa

SEQ ID NO: 11779 - DNA, 13 bp, Artificial Sequence
  synthetic sequence
ctatgatggaaca

SEQ ID NO: 11780 - DNA, 13 bp, Artificial Sequence
  synthetic sequence
caatttatggcag

SEQ ID NO: 11781 - DNA, 13 bp, Artificial Sequence
  synthetic sequence
tgatgttcccaaa

SEQ ID NO: 11782 - DNA, 13 bp, Artificial Sequence
  synthetic sequence
actgcaagagacg

SEQ ID NO: 11783 - DNA, 13 bp, Artificial Sequence
  synthetic sequence
gattattttccag

SEQ ID NO: 11784 - DNA, 13 bp, Artificial Sequence
  synthetic sequence
tattaataagatc

SEQ ID NO: 11785 - DNA, 13 bp, Artificial Sequence
  synthetic sequence
cggcaaagcaagg

SEQ ID NO: 11786 - DNA, 13 bp, Artificial Sequence
  synthetic sequence
aacagataaaccc

SEQ ID NO: 11787 - DNA, 13 bp, Artificial Sequence
  synthetic sequence
ttactgatagaga

SEQ ID NO: 11788 - DNA, 13 bp, Artificial Sequence
  synthetic sequence
atatttgttggag

SEQ ID NO: 11789 - DNA, 13 bp, Artificial Sequence
  synthetic sequence
ccctcgtcttgtg

SEQ ID NO: 11790 - DNA, 13 bp, Artificial Sequence
  synthetic sequence
gctttaccctgcg

SEQ ID NO: 11791 - DNA, 13 bp, Artificial Sequence
  synthetic sequence
gcaaacatctcgt

SEQ ID NO: 11792 - DNA, 13 bp, Artificial Sequence
  synthetic sequence
acctttgcttttt

SEQ ID NO: 11793 - DNA, 13 bp, Artificial Sequence
  synthetic sequence
tcctatctgtgtc

SEQ ID NO: 11794 - DNA, 13 bp, Artificial Sequence
  synthetic sequence
ccctagtgatgag

SEQ ID NO: 11795 - DNA, 13 bp, Artificial Sequence
  synthetic sequence
gaagaaagagggt

SEQ ID NO: 11796 - DNA, 13 bp, Artificial Sequence
  synthetic sequence
aactcattagcta

SEQ ID NO: 11797 - DNA, 13 bp, Artificial Sequence
  synthetic sequence
aatcatttgcgga

SEQ ID NO: 11798 - DNA, 13 bp, Artificial Sequence
  synthetic sequence
gttatgacagaga

SEQ ID NO: 11799 - DNA, 13 bp, Artificial Sequence
  synthetic sequence
aagttgttgagca

SEQ ID NO: 11800 - DNA, 13 bp, Artificial Sequence
  synthetic sequence
tgagagggttcaa

SEQ ID NO: 11801 - DNA, 13 bp, Artificial Sequence
  synthetic sequence
aacagacaacgaa

SEQ ID NO: 11802 - DNA, 13 bp, Artificial Sequence
  synthetic sequence
atacccaggcaat

SEQ ID NO: 11803 - DNA, 13 bp, Artificial Sequence
  synthetic sequence
tgagaatacaaat

SEQ ID NO: 11804 - DNA, 13 bp, Artificial Sequence
  synthetic sequence
tgatggatattgg

SEQ ID NO: 11805 - DNA, 13 bp, Artificial Sequence
  synthetic sequence
aaaaagttgcata

SEQ ID NO: 11806 - DNA, 13 bp, Artificial Sequence
  synthetic sequence
atgactagatttt

SEQ ID NO: 11807 - DNA, 13 bp, Artificial Sequence
  synthetic sequence
aatttatacagtt

SEQ ID NO: 11808 - DNA, 13 bp, Artificial Sequence
  synthetic sequence
ccattctttatta

SEQ ID NO: 11809 - DNA, 13 bp, Artificial Sequence
  synthetic sequence
tagcacacatagc

SEQ ID NO: 11810 - DNA, 13 bp, Artificial Sequence
  synthetic sequence
taaaatgtatgct

SEQ ID NO: 11811 - DNA, 13 bp, Artificial Sequence
  synthetic sequence
agacttttatctt

SEQ ID NO: 11812 - DNA, 13 bp, Artificial Sequence
  synthetic sequence
tcatatccattat

SEQ ID NO: 11813 - DNA, 13 bp, Artificial Sequence
  synthetic sequence
atgatattcgact

SEQ ID NO: 11814 - DNA, 13 bp, Artificial Sequence
  synthetic sequence
ttaactacacata

SEQ ID NO: 11815 - DNA, 13 bp, Artificial Sequence
  synthetic sequence
cctgggttgaata

SEQ ID NO: 11816 - DNA, 13 bp, Artificial Sequence
  synthetic sequence
tttcaaatttaag

SEQ ID NO: 11817 - DNA, 13 bp, Artificial Sequence
  synthetic sequence
tgtatgtcatatg

SEQ ID NO: 11818 - DNA, 13 bp, Artificial Sequence
  synthetic sequence
ctgcaaaatgggt

SEQ ID NO: 11819 - DNA, 13 bp, Artificial Sequence
  synthetic sequence
ccagacaatatct

SEQ ID NO: 11820 - DNA, 13 bp, Artificial Sequence
  synthetic sequence
gtgaaagcttttc

SEQ ID NO: 11821 - DNA, 13 bp, Artificial Sequence
  synthetic sequence
tcactagggtcca

SEQ ID NO: 11822 - DNA, 13 bp, Artificial Sequence
  synthetic sequence
tataaaattatct

SEQ ID NO: 11823 - DNA, 13 bp, Artificial Sequence
  synthetic sequence
taatatgtggtgc

SEQ ID NO: 11824 - DNA, 13 bp, Artificial Sequence
  synthetic sequence
actttagttgata

SEQ ID NO: 11825 - DNA, 13 bp, Artificial Sequence
  synthetic sequence
ttagcttcatatt

SEQ ID NO: 11826 - DNA, 13 bp, Artificial Sequence
  synthetic sequence
agccaatttctct

SEQ ID NO: 11827 - DNA, 13 bp, Artificial Sequence
  synthetic sequence
ttattgttattga

SEQ ID NO: 11828 - DNA, 13 bp, Artificial Sequence
  synthetic sequence
atctttcatatct

SEQ ID NO: 11829 - DNA, 13 bp, Artificial Sequence
  synthetic sequence
ggattatttttac

SEQ ID NO: 11830 - DNA, 13 bp, Artificial Sequence
  synthetic sequence
ctagtgtatatag

SEQ ID NO: 11831 - DNA, 13 bp, Artificial Sequence
  synthetic sequence
ttgtcatatgtta

SEQ ID NO: 11832 - DNA, 13 bp, Artificial Sequence
  synthetic sequence
tcatcaaagtcta

SEQ ID NO: 11833 - DNA, 13 bp, Artificial Sequence
  synthetic sequence
aattctctaaaca

SEQ ID NO: 11834 - DNA, 13 bp, Artificial Sequence
  synthetic sequence
ttctctgcttcat

SEQ ID NO: 11835 - DNA, 13 bp, Artificial Sequence
  synthetic sequence
tcatgagaatgta

SEQ ID NO: 11836 - DNA, 13 bp, Artificial Sequence
  synthetic sequence
aataattgtgctg

SEQ ID NO: 11837 - DNA, 13 bp, Artificial Sequence
  synthetic sequence
ctcccaaatttat

SEQ ID NO: 11838 - DNA, 13 bp, Artificial Sequence
  synthetic sequence
tatgaagccattc

SEQ ID NO: 11839 - DNA, 13 bp, Artificial Sequence
  synthetic sequence
tttattgttgcaa

SEQ ID NO: 11840 - DNA, 13 bp, Artificial Sequence
  synthetic sequence
tctcaaatatttt

SEQ ID NO: 11841 - DNA, 13 bp, Artificial Sequence
  synthetic sequence
agtatatttgtgt

SEQ ID NO: 11842 - DNA, 13 bp, Artificial Sequence
  synthetic sequence
atagtctttgcta

SEQ ID NO: 11843 - DNA, 13 bp, Artificial Sequence
  synthetic sequence
taagttgatatac

SEQ ID NO: 11844 - DNA, 13 bp, Artificial Sequence
  synthetic sequence
ctgttgtgaattt

SEQ ID NO: 11845 - DNA, 13 bp, Artificial Sequence
  synthetic sequence
ctgtactaatcat

SEQ ID NO: 11846 - DNA, 13 bp, Artificial Sequence
  synthetic sequence
ctttttagggaca

SEQ ID NO: 11847 - DNA, 13 bp, Artificial Sequence
  synthetic sequence
tcattttgcgact

SEQ ID NO: 11848 - DNA, 13 bp, Artificial Sequence
  synthetic sequence
ggcacctctcttt

SEQ ID NO: 11849 - DNA, 13 bp, Artificial Sequence
  synthetic sequence
atatctctaagtt

SEQ ID NO: 11850 - DNA, 13 bp, Artificial Sequence
  synthetic sequence
catcaattcagta

SEQ ID NO: 11851 - DNA, 13 bp, Artificial Sequence
  synthetic sequence
ttgcaaaatctat

SEQ ID NO: 11852 - DNA, 13 bp, Artificial Sequence
  synthetic sequence
cttttaatatttc

SEQ ID NO: 11853 - DNA, 13 bp, Artificial Sequence
  synthetic sequence
taaattctggcat

SEQ ID NO: 11854 - DNA, 13 bp, Artificial Sequence
  synthetic sequence
ttatttaccataa

SEQ ID NO: 11855 - DNA, 13 bp, Artificial Sequence
  synthetic sequence
atatttaaggact

SEQ ID NO: 11856 - DNA, 13 bp, Artificial Sequence
  synthetic sequence
tcaccgaattttt

SEQ ID NO: 11857 - DNA, 13 bp, Artificial Sequence
  synthetic sequence
gtcatccaatgac

SEQ ID NO: 11858 - DNA, 13 bp, Artificial Sequence
  synthetic sequence
gaataataattca

SEQ ID NO: 11859 - DNA, 13 bp, Artificial Sequence
  synthetic sequence
actaatctcattc

SEQ ID NO: 11860 - DNA, 13 bp, Artificial Sequence
  synthetic sequence
atttcttgttctg

SEQ ID NO: 11861 - DNA, 13 bp, Artificial Sequence
  synthetic sequence
tgactactgactc

SEQ ID NO: 11862 - DNA, 13 bp, Artificial Sequence
  synthetic sequence
gtattccatctct

SEQ ID NO: 11863 - DNA, 13 bp, Artificial Sequence
  synthetic sequence
aaatctctctgtg

SEQ ID NO: 11864 - DNA, 13 bp, Artificial Sequence
  synthetic sequence
tctctgctatata

SEQ ID NO: 11865 - DNA, 13 bp, Artificial Sequence
  synthetic sequence
cacaaggaatgga

SEQ ID NO: 11866 - DNA, 13 bp, Artificial Sequence
  synthetic sequence
ttacagggtctat

SEQ ID NO: 11867 - DNA, 13 bp, Artificial Sequence
  synthetic sequence
tctttataaatgg

SEQ ID NO: 11868 - DNA, 13 bp, Artificial Sequence
  synthetic sequence
gaaatagttgtta

SEQ ID NO: 11869 - DNA, 13 bp, Artificial Sequence
  synthetic sequence
gaataaattactt

SEQ ID NO: 11870 - DNA, 13 bp, Artificial Sequence
  synthetic sequence
caaactcttttat

SEQ ID NO: 11871 - DNA, 13 bp, Artificial Sequence
  synthetic sequence
tactatcatgtag

SEQ ID NO: 11872 - DNA, 13 bp, Artificial Sequence
  synthetic sequence
ttgtctaagtcag

SEQ ID NO: 11873 - DNA, 13 bp, Artificial Sequence
  synthetic sequence
tcatatttatcta

SEQ ID NO: 11874 - DNA, 13 bp, Artificial Sequence
  synthetic sequence
tctttctctaggg

SEQ ID NO: 11875 - DNA, 13 bp, Artificial Sequence
  synthetic sequence
atttgcatagctc

SEQ ID NO: 11876 - DNA, 13 bp, Artificial Sequence
  synthetic sequence
ttccagaattctg

SEQ ID NO: 11877 - DNA, 13 bp, Artificial Sequence
  synthetic sequence
aagaaacaattct

SEQ ID NO: 11878 - DNA, 13 bp, Artificial Sequence
  synthetic sequence
tatatatccctaa

SEQ ID NO: 11879 - DNA, 13 bp, Artificial Sequence
  synthetic sequence
acaaacattggat

SEQ ID NO: 11880 - DNA, 13 bp, Artificial Sequence
  synthetic sequence
tttctgattcata

SEQ ID NO: 11881 - DNA, 13 bp, Artificial Sequence
  synthetic sequence
aaatctctttgtg

SEQ ID NO: 11882 - DNA, 13 bp, Artificial Sequence
  synthetic sequence
gaaatggtggtta

SEQ ID NO: 11883 - DNA, 13 bp, Artificial Sequence
  synthetic sequence
tttattaagcata

SEQ ID NO: 11884 - DNA, 13 bp, Artificial Sequence
  synthetic sequence
gaaaatttctcag

SEQ ID NO: 11885 - DNA, 13 bp, Artificial Sequence
  synthetic sequence
ctggcattgttga

SEQ ID NO: 11886 - DNA, 13 bp, Artificial Sequence
  synthetic sequence
tgatcattgataa

SEQ ID NO: 11887 - DNA, 13 bp, Artificial Sequence
  synthetic sequence
agaagtcatccag

SEQ ID NO: 11888 - DNA, 13 bp, Artificial Sequence
  synthetic sequence
aatccactagcca

SEQ ID NO: 11889 - DNA, 13 bp, Artificial Sequence
  synthetic sequence
ccaagattctctg

SEQ ID NO: 11890 - DNA, 13 bp, Artificial Sequence
  synthetic sequence
accaagaaccgga

SEQ ID NO: 11891 - DNA, 13 bp, Artificial Sequence
  synthetic sequence
ccaactttaatcc

SEQ ID NO: 11892 - DNA, 13 bp, Artificial Sequence
  synthetic sequence
actgcctgctgtt

SEQ ID NO: 11893 - DNA, 13 bp, Artificial Sequence
  synthetic sequence
tatcaattcttta

SEQ ID NO: 11894 - DNA, 13 bp, Artificial Sequence
  synthetic sequence
atgttatagcctc

SEQ ID NO: 11895 - DNA, 13 bp, Artificial Sequence
  synthetic sequence
atttctcactttt

SEQ ID NO: 11896 - DNA, 13 bp, Artificial Sequence
  synthetic sequence
caggaagatcttg

SEQ ID NO: 11897 - DNA, 13 bp, Artificial Sequence
  synthetic sequence
agtatttgtaaaa

SEQ ID NO: 11898 - DNA, 13 bp, Artificial Sequence
  synthetic sequence
cttttcataaagt

SEQ ID NO: 11899 - DNA, 13 bp, Artificial Sequence
  synthetic sequence
gaagtatctgcaa

SEQ ID NO: 11900 - DNA, 13 bp, Artificial Sequence
  synthetic sequence
tatattacttgaa

SEQ ID NO: 11901 - DNA, 13 bp, Artificial Sequence
  synthetic sequence
gattgagtaaatc

SEQ ID NO: 11902 - DNA, 13 bp, Artificial Sequence
  synthetic sequence
ataccctttatgc

SEQ ID NO: 11903 - DNA, 13 bp, Artificial Sequence
  synthetic sequence
tgttcgcactcta

SEQ ID NO: 11904 - DNA, 13 bp, Artificial Sequence
  synthetic sequence
tctgattgaccac

SEQ ID NO: 11905 - DNA, 13 bp, Artificial Sequence
  synthetic sequence
atagcaattctga

SEQ ID NO: 11906 - DNA, 13 bp, Artificial Sequence
  synthetic sequence
aaattcttttata

SEQ ID NO: 11907 - DNA, 13 bp, Artificial Sequence
  synthetic sequence
tcatttatattat

SEQ ID NO: 11908 - DNA, 13 bp, Artificial Sequence
  synthetic sequence
ttacaggatctat

SEQ ID NO: 11909 - DNA, 13 bp, Artificial Sequence
  synthetic sequence
tgatatgtaaatc

SEQ ID NO: 11910 - DNA, 13 bp, Artificial Sequence
  synthetic sequence
tccttgaagccaa

SEQ ID NO: 11911 - DNA, 13 bp, Artificial Sequence
  synthetic sequence
gcaaagtctataa

SEQ ID NO: 11912 - DNA, 13 bp, Artificial Sequence
  synthetic sequence
tttgtgttaaata

SEQ ID NO: 11913 - DNA, 13 bp, Artificial Sequence
  synthetic sequence
ccctggtaaacta

SEQ ID NO: 11914 - DNA, 13 bp, Artificial Sequence
  synthetic sequence
cagatatgcattg

SEQ ID NO: 11915 - DNA, 13 bp, Artificial Sequence
  synthetic sequence
tacagtttgtaac

SEQ ID NO: 11916 - DNA, 13 bp, Artificial Sequence
  synthetic sequence
atacaaactggtg

SEQ ID NO: 11917 - DNA, 13 bp, Artificial Sequence
  synthetic sequence
aaggaatgaatca

SEQ ID NO: 11918 - DNA, 13 bp, Artificial Sequence
  synthetic sequence
tggattctgtatt

SEQ ID NO: 11919 - DNA, 13 bp, Artificial Sequence
  synthetic sequence
tgtcagggttatt

SEQ ID NO: 11920 - DNA, 13 bp, Artificial Sequence
  synthetic sequence
tcattggtcagtt

SEQ ID NO: 11921 - DNA, 13 bp, Artificial Sequence
  synthetic sequence
ttataacactgct

SEQ ID NO: 11922 - DNA, 13 bp, Artificial Sequence
  synthetic sequence
tagatctattgta

SEQ ID NO: 11923 - DNA, 13 bp, Artificial Sequence
  synthetic sequence
tttttgcatgact

SEQ ID NO: 11924 - DNA, 13 bp, Artificial Sequence
  synthetic sequence
caaaatctagtat

SEQ ID NO: 11925 - DNA, 13 bp, Artificial Sequence
  synthetic sequence
gtctaattgtcag

SEQ ID NO: 11926 - DNA, 13 bp, Artificial Sequence
  synthetic sequence
taatctgtataat

SEQ ID NO: 11927 - DNA, 13 bp, Artificial Sequence
  synthetic sequence
gttctgatttttg

SEQ ID NO: 11928 - DNA, 13 bp, Artificial Sequence
  synthetic sequence
cctttagtcacta

SEQ ID NO: 11929 - DNA, 13 bp, Artificial Sequence
  synthetic sequence
atctgagtatttt

SEQ ID NO: 11930 - DNA, 13 bp, Artificial Sequence
  synthetic sequence
ttcttcatcgtca

SEQ ID NO: 11931 - DNA, 13 bp, Artificial Sequence
  synthetic sequence
tggcttcaaccca

SEQ ID NO: 11932 - DNA, 13 bp, Artificial Sequence
  synthetic sequence
attcatctggcag

SEQ ID NO: 11933 - DNA, 13 bp, Artificial Sequence
  synthetic sequence
cttttgctatcct

SEQ ID NO: 11934 - DNA, 13 bp, Artificial Sequence
  synthetic sequence
tagagaaattcat

SEQ ID NO: 11935 - DNA, 13 bp, Artificial Sequence
  synthetic sequence
cagacaggaactc

SEQ ID NO: 11936 - DNA, 13 bp, Artificial Sequence
  synthetic sequence
tttctatcttctc

SEQ ID NO: 11937 - DNA, 13 bp, Artificial Sequence
  synthetic sequence
tatacaatttgtt

SEQ ID NO: 11938 - DNA, 13 bp, Artificial Sequence
  synthetic sequence
tttttatcaagca

SEQ ID NO: 11939 - DNA, 13 bp, Artificial Sequence
  synthetic sequence
gtaaggggaaaac

SEQ ID NO: 11940 - DNA, 13 bp, Artificial Sequence
  synthetic sequence
tgatgcgcaatgg

SEQ ID NO: 11941 - DNA, 13 bp, Artificial Sequence
  synthetic sequence
tgatgtgcccatt

SEQ ID NO: 11942 - DNA, 13 bp, Artificial Sequence
  synthetic sequence
atgatgccatctg

SEQ ID NO: 11943 - DNA, 13 bp, Artificial Sequence
  synthetic sequence
tttgttgttagca

SEQ ID NO: 11944 - DNA, 13 bp, Artificial Sequence
  synthetic sequence
tgaatgcaaatgc

SEQ ID NO: 11945 - DNA, 13 bp, Artificial Sequence
  synthetic sequence
cttgttagtgctg

SEQ ID NO: 11946 - DNA, 13 bp, Artificial Sequence
  synthetic sequence
aggacaaaaatgt

SEQ ID NO: 11947 - DNA, 13 bp, Artificial Sequence
  synthetic sequence
accaacatcatac

SEQ ID NO: 11948 - DNA, 13 bp, Artificial Sequence
  synthetic sequence
gaacccagaatgg

SEQ ID NO: 11949 - DNA, 13 bp, Artificial Sequence
  synthetic sequence
agtttgaagatta

SEQ ID NO: 11950 - DNA, 13 bp, Artificial Sequence
  synthetic sequence
tcagtgatgactt

SEQ ID NO: 11951 - DNA, 13 bp, Artificial Sequence
  synthetic sequence
gtgatgatgtggt

SEQ ID NO: 11952 - DNA, 13 bp, Artificial Sequence
  synthetic sequence
atgagctcaaaaa

SEQ ID NO: 11953 - DNA, 13 bp, Artificial Sequence
  synthetic sequence
ctgttgtgaatgc

SEQ ID NO: 11954 - DNA, 13 bp, Artificial Sequence
  synthetic sequence
tttgaaaatgcaa

SEQ ID NO: 11955 - DNA, 13 bp, Artificial Sequence
  synthetic sequence
ccaaaaagtgtgg

SEQ ID NO: 11956 - DNA, 13 bp, Artificial Sequence
  synthetic sequence
atcacaaaggaga

SEQ ID NO: 11957 - DNA, 13 bp, Artificial Sequence
  synthetic sequence
aacattacactgt

SEQ ID NO: 11958 - DNA, 13 bp, Artificial Sequence
  synthetic sequence
tgcatcgattcag

SEQ ID NO: 11959 - DNA, 13 bp, Artificial Sequence
  synthetic sequence
agtgtaaagagcc

SEQ ID NO: 11960 - DNA, 13 bp, Artificial Sequence
  synthetic sequence
cttctgattttta

SEQ ID NO: 11961 - DNA, 13 bp, Artificial Sequence
  synthetic sequence
ctcaaaaatggtg

SEQ ID NO: 11962 - DNA, 13 bp, Artificial Sequence
  synthetic sequence
gatcatgtcctga

SEQ ID NO: 11963 - DNA, 13 bp, Artificial Sequence
  synthetic sequence
aacagtatgaaaa

SEQ ID NO: 11964 - DNA, 13 bp, Artificial Sequence
  synthetic sequence
tctctagattggt

SEQ ID NO: 11965 - DNA, 13 bp, Artificial Sequence
  synthetic sequence
cagagacccatgg

SEQ ID NO: 11966 - DNA, 13 bp, Artificial Sequence
  synthetic sequence
agtttgaggatta

SEQ ID NO: 11967 - DNA, 13 bp, Artificial Sequence
  synthetic sequence
tcactttatttga

SEQ ID NO: 11968 - DNA, 13 bp, Artificial Sequence
  synthetic sequence
aatttagagacct

SEQ ID NO: 11969 - DNA, 13 bp, Artificial Sequence
  synthetic sequence
tattttgaaatgg

SEQ ID NO: 11970 - DNA, 13 bp, Artificial Sequence
  synthetic sequence
accactgttgaca

SEQ ID NO: 11971 - DNA, 13 bp, Artificial Sequence
  synthetic sequence
atgtttaggaatg

SEQ ID NO: 11972 - DNA, 13 bp, Artificial Sequence
  synthetic sequence
aatcagcttttca

SEQ ID NO: 11973 - DNA, 13 bp, Artificial Sequence
  synthetic sequence
gccagactggttc

SEQ ID NO: 11974 - DNA, 13 bp, Artificial Sequence
  synthetic sequence
caatcactcctga

SEQ ID NO: 11975 - DNA, 13 bp, Artificial Sequence
  synthetic sequence
atcaaaagcaggt

SEQ ID NO: 11976 - DNA, 13 bp, Artificial Sequence
  synthetic sequence
gaccccatgacca

SEQ ID NO: 11977 - DNA, 13 bp, Artificial Sequence
  synthetic sequence
gttctagaggtta

SEQ ID NO: 11978 - DNA, 13 bp, Artificial Sequence
  synthetic sequence
gcaggcatcacac

SEQ ID NO: 11979 - DNA, 13 bp, Artificial Sequence
  synthetic sequence
tcttcaaaggtga

SEQ ID NO: 11980 - DNA, 13 bp, Artificial Sequence
  synthetic sequence
agaacaacactga

SEQ ID NO: 11981 - DNA, 13 bp, Artificial Sequence
  synthetic sequence
gaaagcaattctg

SEQ ID NO: 11982 - DNA, 13 bp, Artificial Sequence
  synthetic sequence
aaggaattctctg

SEQ ID NO: 11983 - DNA, 13 bp, Artificial Sequence
  synthetic sequence
gacttttgaggaa

SEQ ID NO: 11984 - DNA, 13 bp, Artificial Sequence
  synthetic sequence
atcacacctgctg

SEQ ID NO: 11985 - DNA, 13 bp, Artificial Sequence
  synthetic sequence
aagaacaatgtgg

SEQ ID NO: 11986 - DNA, 13 bp, Artificial Sequence
  synthetic sequence
gaatactggatgg

SEQ ID NO: 11987 - DNA, 13 bp, Artificial Sequence
  synthetic sequence
tgattgacaattc

SEQ ID NO: 11988 - DNA, 13 bp, Artificial Sequence
  synthetic sequence
gggtgtttgggtc

SEQ ID NO: 11989 - DNA, 13 bp, Artificial Sequence
  synthetic sequence
cctgagagctcaa

SEQ ID NO: 11990 - DNA, 13 bp, Artificial Sequence
  synthetic sequence
atgactaactctg

SEQ ID NO: 11991 - DNA, 13 bp, Artificial Sequence
  synthetic sequence
tgaatcagttagc

SEQ ID NO: 11992 - DNA, 13 bp, Artificial Sequence
  synthetic sequence
tgttgctatagta

SEQ ID NO: 11993 - DNA, 13 bp, Artificial Sequence
  synthetic sequence
cttcttgagtgtt

SEQ ID NO: 11994 - DNA, 13 bp, Artificial Sequence
  synthetic sequence
acaaccacgacga

SEQ ID NO: 11995 - DNA, 13 bp, Artificial Sequence
  synthetic sequence
gaagaagagacaa

SEQ ID NO: 11996 - DNA, 13 bp, Artificial Sequence
  synthetic sequence
tggagaccaagga

SEQ ID NO: 11997 - DNA, 13 bp, Artificial Sequence
  synthetic sequence
ctccaggtgttaa

SEQ ID NO: 11998 - DNA, 13 bp, Artificial Sequence
  synthetic sequence
actagaaggagac

SEQ ID NO: 11999 - DNA, 13 bp, Artificial Sequence
  synthetic sequence
aaaggactacatc

SEQ ID NO: 12000 - DNA, 13 bp, Artificial Sequence
  synthetic sequence
aaagtaattctga

SEQ ID NO: 12001 - DNA, 13 bp, Artificial Sequence
  synthetic sequence
ccttgctgttgcg

SEQ ID NO: 12002 - DNA, 13 bp, Artificial Sequence
  synthetic sequence
gtatggactctat

SEQ ID NO: 12003 - DNA, 13 bp, Artificial Sequence
  synthetic sequence
agttttgagcact

SEQ ID NO: 12004 - DNA, 13 bp, Artificial Sequence
  synthetic sequence
ggttggatggctc

SEQ ID NO: 12005 - DNA, 13 bp, Artificial Sequence
  synthetic sequence
aagtcagctttcc

SEQ ID NO: 12006 - DNA, 13 bp, Artificial Sequence
  synthetic sequence
tttgccaagtaat

SEQ ID NO: 12007 - DNA, 13 bp, Artificial Sequence
  synthetic sequence
ggttcatcaacta

SEQ ID NO: 12008 - DNA, 13 bp, Artificial Sequence
  synthetic sequence
aaatctgtatatc

SEQ ID NO: 12009 - DNA, 13 bp, Artificial Sequence
  synthetic sequence
tgatgacaaatct

SEQ ID NO: 12010 - DNA, 13 bp, Artificial Sequence
  synthetic sequence
tagtagaggactt

SEQ ID NO: 12011 - DNA, 13 bp, Artificial Sequence
  synthetic sequence
tttataacagcag

SEQ ID NO: 12012 - DNA, 13 bp, Artificial Sequence
  synthetic sequence
tctttaagggtga

SEQ ID NO: 12013 - DNA, 13 bp, Artificial Sequence
  synthetic sequence
caaccccaggtgt

SEQ ID NO: 12014 - DNA, 13 bp, Artificial Sequence
  synthetic sequence
agcattacggact

SEQ ID NO: 12015 - DNA, 13 bp, Artificial Sequence
  synthetic sequence
accgtgatcatat

SEQ ID NO: 12016 - DNA, 13 bp, Artificial Sequence
  synthetic sequence
agaacactggacc

SEQ ID NO: 12017 - DNA, 13 bp, Artificial Sequence
  synthetic sequence
agaactggtgagc

SEQ ID NO: 12018 - DNA, 13 bp, Artificial Sequence
  synthetic sequence
atttcacctcagt

SEQ ID NO: 12019 - DNA, 13 bp, Artificial Sequence
  synthetic sequence
cagaagctcaccg

SEQ ID NO: 12020 - DNA, 13 bp, Artificial Sequence
  synthetic sequence
tgatttcctttta

SEQ ID NO: 12021 - DNA, 13 bp, Artificial Sequence
  synthetic sequence
tgcttaggttttt

SEQ ID NO: 12022 - DNA, 13 bp, Artificial Sequence
  synthetic sequence
cagtggactttac

SEQ ID NO: 12023 - DNA, 13 bp, Artificial Sequence
  synthetic sequence
ttgacccatcatg

SEQ ID NO: 12024 - DNA, 13 bp, Artificial Sequence
  synthetic sequence
aaacaggttcaaa

SEQ ID NO: 12025 - DNA, 13 bp, Artificial Sequence
  synthetic sequence
tttccttctatgc

SEQ ID NO: 12026 - DNA, 13 bp, Artificial Sequence
  synthetic sequence
tgccagattggtt

SEQ ID NO: 12027 - DNA, 13 bp, Artificial Sequence
  synthetic sequence
tctccttttatgc

SEQ ID NO: 12028 - DNA, 13 bp, Artificial Sequence
  synthetic sequence
ccaaaggcattta

SEQ ID NO: 12029 - DNA, 13 bp, Artificial Sequence
  synthetic sequence
ttaaaccatgtga

SEQ ID NO: 12030 - DNA, 13 bp, Artificial Sequence
  synthetic sequence
aatgtggaaaggc

SEQ ID NO: 12031 - DNA, 13 bp, Artificial Sequence
  synthetic sequence
aacgttaagtgca

SEQ ID NO: 12032 - DNA, 13 bp, Artificial Sequence
  synthetic sequence
ttgtgaagttgga

SEQ ID NO: 12033 - DNA, 13 bp, Artificial Sequence
  synthetic sequence
aagtattttgcca

SEQ ID NO: 12034 - DNA, 13 bp, Artificial Sequence
  synthetic sequence
caatgaccatcaa

SEQ ID NO: 12035 - DNA, 13 bp, Artificial Sequence
  synthetic sequence
agaaacaagtttt

SEQ ID NO: 12036 - DNA, 13 bp, Artificial Sequence
  synthetic sequence
atcaccttatttg

SEQ ID NO: 12037 - DNA, 13 bp, Artificial Sequence
  synthetic sequence
acaactgttactg

SEQ ID NO: 12038 - DNA, 13 bp, Artificial Sequence
  synthetic sequence
acaaacagcatga

SEQ ID NO: 12039 - DNA, 13 bp, Artificial Sequence
  synthetic sequence
ttgttaaccctaa

SEQ ID NO: 12040 - DNA, 13 bp, Artificial Sequence
  synthetic sequence
aaacagggaaaac

SEQ ID NO: 12041 - DNA, 13 bp, Artificial Sequence
  synthetic sequence
gtggaagattttg

SEQ ID NO: 12042 - DNA, 13 bp, Artificial Sequence
  synthetic sequence
ttcaaatctttga

SEQ ID NO: 12043 - DNA, 13 bp, Artificial Sequence
  synthetic sequence
aatatgagatgga

SEQ ID NO: 12044 - DNA, 13 bp, Artificial Sequence
  synthetic sequence
catcatcttcagg

SEQ ID NO: 12045 - DNA, 13 bp, Artificial Sequence
  synthetic sequence
attagacctctta

SEQ ID NO: 12046 - DNA, 13 bp, Artificial Sequence
  synthetic sequence
gtttttagcatga

SEQ ID NO: 12047 - DNA, 13 bp, Artificial Sequence
  synthetic sequence
cgtcatacacctc

SEQ ID NO: 12048 - DNA, 13 bp, Artificial Sequence
  synthetic sequence
cccatcagtaatg

SEQ ID NO: 12049 - DNA, 13 bp, Artificial Sequence
  synthetic sequence
ttgtcaaccctaa

SEQ ID NO: 12050 - DNA, 13 bp, Artificial Sequence
  synthetic sequence
agaacaaaaatgt

SEQ ID NO: 12051 - DNA, 13 bp, Artificial Sequence
  synthetic sequence
ctgagggtttgat

SEQ ID NO: 12052 - DNA, 13 bp, Artificial Sequence
  synthetic sequence
tttgaagattaca

SEQ ID NO: 12053 - DNA, 13 bp, Artificial Sequence
  synthetic sequence
aagtggaagaggg

SEQ ID NO: 12054 - DNA, 13 bp, Artificial Sequence
  synthetic sequence
agcggagcctata

SEQ ID NO: 12055 - DNA, 13 bp, Artificial Sequence
  synthetic sequence
cattgggttggtt

SEQ ID NO: 12056 - DNA, 13 bp, Artificial Sequence
  synthetic sequence
gaggactatatgg

SEQ ID NO: 12057 - DNA, 13 bp, Artificial Sequence
  synthetic sequence
cctgttgtgagtg

SEQ ID NO: 12058 - DNA, 13 bp, Artificial Sequence
  synthetic sequence
cctgttatgtatt

SEQ ID NO: 12059 - DNA, 13 bp, Artificial Sequence
  synthetic sequence
gttcagaatatct

SEQ ID NO: 12060 - DNA, 13 bp, Artificial Sequence
  synthetic sequence
tagcagaacctgt

SEQ ID NO: 12061 - DNA, 13 bp, Artificial Sequence
  synthetic sequence
aagtcagcctttc

SEQ ID NO: 12062 - DNA, 13 bp, Artificial Sequence
  synthetic sequence
aaaaggactacac

SEQ ID NO: 12063 - DNA, 13 bp, Artificial Sequence
  synthetic sequence
tgggacttagttt

SEQ ID NO: 12064 - DNA, 13 bp, Artificial Sequence
  synthetic sequence
aagagcttaaaat

SEQ ID NO: 12065 - DNA, 13 bp, Artificial Sequence
  synthetic sequence
gaatgtgtcatac

SEQ ID NO: 12066 - DNA, 13 bp, Artificial Sequence
  synthetic sequence
tttcacttcagct

SEQ ID NO: 12067 - DNA, 13 bp, Artificial Sequence
  synthetic sequence
tgcgatgatgtgg

SEQ ID NO: 12068 - DNA, 13 bp, Artificial Sequence
  synthetic sequence
ctcaagaatggtg

SEQ ID NO: 12069 - DNA, 13 bp, Artificial Sequence
  synthetic sequence
aggtgttttgcca

SEQ ID NO: 12070 - DNA, 13 bp, Artificial Sequence
  synthetic sequence
gtaaactgtatcc

SEQ ID NO: 12071 - DNA, 13 bp, Artificial Sequence
  synthetic sequence
gtcatcggttcca

SEQ ID NO: 12072 - DNA, 13 bp, Artificial Sequence
  synthetic sequence
aacgaggaatttt

SEQ ID NO: 12073 - DNA, 13 bp, Artificial Sequence
  synthetic sequence
tgattttgagagg

SEQ ID NO: 12074 - DNA, 13 bp, Artificial Sequence
  synthetic sequence
aggaacagaaaaa

SEQ ID NO: 12075 - DNA, 13 bp, Artificial Sequence
  synthetic sequence
aagtcaaaagttt

SEQ ID NO: 12076 - DNA, 13 bp, Artificial Sequence
  synthetic sequence
tttagagatcttt

SEQ ID NO: 12077 - DNA, 13 bp, Artificial Sequence
  synthetic sequence
agtcagttggcaa

SEQ ID NO: 12078 - DNA, 13 bp, Artificial Sequence
  synthetic sequence
tcatggattagat

SEQ ID NO: 12079 - DNA, 13 bp, Artificial Sequence
  synthetic sequence
gcgatttgctgca

SEQ ID NO: 12080 - DNA, 13 bp, Artificial Sequence
  synthetic sequence
agattctcttatt

SEQ ID NO: 12081 - DNA, 13 bp, Artificial Sequence
  synthetic sequence
aagcagagacacc

SEQ ID NO: 12082 - DNA, 13 bp, Artificial Sequence
  synthetic sequence
tttaaacttttgg

SEQ ID NO: 12083 - DNA, 13 bp, Artificial Sequence
  synthetic sequence
aagactttgatcc

SEQ ID NO: 12084 - DNA, 13 bp, Artificial Sequence
  synthetic sequence
tgcttcggttttt

SEQ ID NO: 12085 - DNA, 13 bp, Artificial Sequence
  synthetic sequence
gaattagtgagag

SEQ ID NO: 12086 - DNA, 13 bp, Artificial Sequence
  synthetic sequence
agagaatactttg

SEQ ID NO: 12087 - DNA, 13 bp, Artificial Sequence
  synthetic sequence
ggtgaggtggaca

SEQ ID NO: 12088 - DNA, 13 bp, Artificial Sequence
  synthetic sequence
tatatcagaaagg

SEQ ID NO: 12089 - DNA, 13 bp, Artificial Sequence
  synthetic sequence
gcacaaacttgtt

SEQ ID NO: 12090 - DNA, 13 bp, Artificial Sequence
  synthetic sequence
ctgagagttcgag

SEQ ID NO: 12091 - DNA, 13 bp, Artificial Sequence
  synthetic sequence
gttgagacaattc

SEQ ID NO: 12092 - DNA, 13 bp, Artificial Sequence
  synthetic sequence
ggtcatgtcctga

SEQ ID NO: 12093 - DNA, 13 bp, Artificial Sequence
  synthetic sequence
cccaggatggtgt

SEQ ID NO: 12094 - DNA, 13 bp, Artificial Sequence
  synthetic sequence
tgcctctgatttt

SEQ ID NO: 12095 - DNA, 13 bp, Artificial Sequence
  synthetic sequence
gattggctagatg

SEQ ID NO: 12096 - DNA, 13 bp, Artificial Sequence
  synthetic sequence
tcagaagcaggtt

SEQ ID NO: 12097 - DNA, 13 bp, Artificial Sequence
  synthetic sequence
gcagacccaaaaa

SEQ ID NO: 12098 - DNA, 13 bp, Artificial Sequence
  synthetic sequence
agaagaaagtcaa

SEQ ID NO: 12099 - DNA, 13 bp, Artificial Sequence
  synthetic sequence
gcatcaattggtt

SEQ ID NO: 12100 - DNA, 13 bp, Artificial Sequence
  synthetic sequence
tctagaatatgat

SEQ ID NO: 12101 - DNA, 13 bp, Artificial Sequence
  synthetic sequence
ttacatcaccttc

SEQ ID NO: 12102 - DNA, 13 bp, Artificial Sequence
  synthetic sequence
ggttgacagtgac

SEQ ID NO: 12103 - DNA, 13 bp, Artificial Sequence
  synthetic sequence
tgaacaccagaag

SEQ ID NO: 12104 - DNA, 13 bp, Artificial Sequence
  synthetic sequence
ctagaaggaaaca

SEQ ID NO: 12105 - DNA, 13 bp, Artificial Sequence
  synthetic sequence
caaagctggtctc

SEQ ID NO: 12106 - DNA, 13 bp, Artificial Sequence
  synthetic sequence
gtggatttcacac

SEQ ID NO: 12107 - DNA, 13 bp, Artificial Sequence
  synthetic sequence
actttgagaggat

SEQ ID NO: 12108 - DNA, 13 bp, Artificial Sequence
  synthetic sequence
gggtcttagcaga

SEQ ID NO: 12109 - DNA, 13 bp, Artificial Sequence
  synthetic sequence
agaaccgcatcaa

SEQ ID NO: 12110 - DNA, 13 bp, Artificial Sequence
  synthetic sequence
acaaattcatcag

SEQ ID NO: 12111 - DNA, 13 bp, Artificial Sequence
  synthetic sequence
aatcccttgattt

SEQ ID NO: 12112 - DNA, 13 bp, Artificial Sequence
  synthetic sequence
actttaaattcag

SEQ ID NO: 12113 - DNA, 13 bp, Artificial Sequence
  synthetic sequence
atgacaaacattg

SEQ ID NO: 12114 - DNA, 13 bp, Artificial Sequence
  synthetic sequence
ttgataagcgttc

SEQ ID NO: 12115 - DNA, 13 bp, Artificial Sequence
  synthetic sequence
ggacaaagagaac

SEQ ID NO: 12116 - DNA, 13 bp, Artificial Sequence
  synthetic sequence
aagtgcttgagga

SEQ ID NO: 12117 - DNA, 13 bp, Artificial Sequence
  synthetic sequence
cattcaaaggagg

SEQ ID NO: 12118 - DNA, 13 bp, Artificial Sequence
  synthetic sequence
tgatgtgtccatt

SEQ ID NO: 12119 - DNA, 13 bp, Artificial Sequence
  synthetic sequence
ctagaagacaagg

SEQ ID NO: 12120 - DNA, 13 bp, Artificial Sequence
  synthetic sequence
agtctgttgaaac

SEQ ID NO: 12121 - DNA, 13 bp, Artificial Sequence
  synthetic sequence
cattgggttggct

SEQ ID NO: 12122 - DNA, 13 bp, Artificial Sequence
  synthetic sequence
tggtaaactgcat

SEQ ID NO: 12123 - DNA, 13 bp, Artificial Sequence
  synthetic sequence
gataaggtgagtt

SEQ ID NO: 12124 - DNA, 13 bp, Artificial Sequence
  synthetic sequence
gtgatggccatag

SEQ ID NO: 12125 - DNA, 13 bp, Artificial Sequence
  synthetic sequence
aaagaagtattct

SEQ ID NO: 12126 - DNA, 13 bp, Artificial Sequence
  synthetic sequence
atgactttccaag

SEQ ID NO: 12127 - DNA, 13 bp, Artificial Sequence
  synthetic sequence
cctatgtttagaa

SEQ ID NO: 12128 - DNA, 13 bp, Artificial Sequence
  synthetic sequence
gttcatcacagca

SEQ ID NO: 12129 - DNA, 13 bp, Artificial Sequence
  synthetic sequence
aagtcaaacctga

SEQ ID NO: 12130 - DNA, 13 bp, Artificial Sequence
  synthetic sequence
acagcattaaaac

SEQ ID NO: 12131 - DNA, 13 bp, Artificial Sequence
  synthetic sequence
agtcgatctcctc

SEQ ID NO: 12132 - DNA, 13 bp, Artificial Sequence
  synthetic sequence
tcatcacttgatg

SEQ ID NO: 12133 - DNA, 13 bp, Artificial Sequence
  synthetic sequence
ggttggtgagcat

SEQ ID NO: 12134 - DNA, 13 bp, Artificial Sequence
  synthetic sequence
ggtaagagaacca

SEQ ID NO: 12135 - DNA, 13 bp, Artificial Sequence
  synthetic sequence
caacagcctcaca

SEQ ID NO: 12136 - DNA, 13 bp, Artificial Sequence
  synthetic sequence
cttgctacataat

SEQ ID NO: 12137 - DNA, 13 bp, Artificial Sequence
  synthetic sequence
caaaacattttat

SEQ ID NO: 12138 - DNA, 13 bp, Artificial Sequence
  synthetic sequence
cccagtcaaattt

SEQ ID NO: 12139 - DNA, 13 bp, Artificial Sequence
  synthetic sequence
gatcctcaaagat

SEQ ID NO: 12140 - DNA, 13 bp, Artificial Sequence
  synthetic sequence
gtgctaacatgat

SEQ ID NO: 12141 - DNA, 13 bp, Artificial Sequence
  synthetic sequence
ttatcataatcac

SEQ ID NO: 12142 - DNA, 13 bp, Artificial Sequence
  synthetic sequence
gcttctgtgcacc

SEQ ID NO: 12143 - DNA, 13 bp, Artificial Sequence
  synthetic sequence
ttcccccaacctg

SEQ ID NO: 12144 - DNA, 13 bp, Artificial Sequence
  synthetic sequence
ttgaaaactccaa

SEQ ID NO: 12145 - DNA, 13 bp, Artificial Sequence
  synthetic sequence
cctcatctgaaaa

SEQ ID NO: 12146 - DNA, 13 bp, Artificial Sequence
  synthetic sequence
aactttctacaaa

SEQ ID NO: 12147 - DNA, 13 bp, Artificial Sequence
  synthetic sequence
catcaggaatgat

SEQ ID NO: 12148 - DNA, 13 bp, Artificial Sequence
  synthetic sequence
tttgcactcaaca

SEQ ID NO: 12149 - DNA, 13 bp, Artificial Sequence
  synthetic sequence
gcctatcattcac

SEQ ID NO: 12150 - DNA, 13 bp, Artificial Sequence
  synthetic sequence
gttctccatttag

SEQ ID NO: 12151 - DNA, 13 bp, Artificial Sequence
  synthetic sequence
tcataatttcatc

SEQ ID NO: 12152 - DNA, 13 bp, Artificial Sequence
  synthetic sequence
gtctgcactgtct

SEQ ID NO: 12153 - DNA, 13 bp, Artificial Sequence
  synthetic sequence
gactctgagttga

SEQ ID NO: 12154 - DNA, 13 bp, Artificial Sequence
  synthetic sequence
aaatgaccttcct

SEQ ID NO: 12155 - DNA, 13 bp, Artificial Sequence
  synthetic sequence
cagcactcataca

SEQ ID NO: 12156 - DNA, 13 bp, Artificial Sequence
  synthetic sequence
ttagtgtcctcta

SEQ ID NO: 12157 - DNA, 13 bp, Artificial Sequence
  synthetic sequence
ctgaaaagaaact

SEQ ID NO: 12158 - DNA, 13 bp, Artificial Sequence
  synthetic sequence
tttctcacacacc

SEQ ID NO: 12159 - DNA, 13 bp, Artificial Sequence
  synthetic sequence
gagaggagcctct

SEQ ID NO: 12160 - DNA, 13 bp, Artificial Sequence
  synthetic sequence
acaaatgattcaa

SEQ ID NO: 12161 - DNA, 13 bp, Artificial Sequence
  synthetic sequence
ccacttgatacct

SEQ ID NO: 12162 - DNA, 13 bp, Artificial Sequence
  synthetic sequence
tgcaagattccct

SEQ ID NO: 12163 - DNA, 13 bp, Artificial Sequence
  synthetic sequence
cctttgaaaatta

SEQ ID NO: 12164 - DNA, 13 bp, Artificial Sequence
  synthetic sequence
cagactcttcaaa

SEQ ID NO: 12165 - DNA, 13 bp, Artificial Sequence
  synthetic sequence
tcatttgctcata

SEQ ID NO: 12166 - DNA, 13 bp, Artificial Sequence
  synthetic sequence
ctgtgttctttga

SEQ ID NO: 12167 - DNA, 13 bp, Artificial Sequence
  synthetic sequence
aatgatgtagatg

SEQ ID NO: 12168 - DNA, 13 bp, Artificial Sequence
  synthetic sequence
gattctccagtct

SEQ ID NO: 12169 - DNA, 13 bp, Artificial Sequence
  synthetic sequence
ttggtccccattt

SEQ ID NO: 12170 - DNA, 13 bp, Artificial Sequence
  synthetic sequence
agttgctcaatga

SEQ ID NO: 12171 - DNA, 13 bp, Artificial Sequence
  synthetic sequence
atatgacttcatc

SEQ ID NO: 12172 - DNA, 13 bp, Artificial Sequence
  synthetic sequence
atatgatttcatc

SEQ ID NO: 12173 - DNA, 13 bp, Artificial Sequence
  synthetic sequence
gagtctgtcctca

SEQ ID NO: 12174 - DNA, 13 bp, Artificial Sequence
  synthetic sequence
caaggtcagaaaa

SEQ ID NO: 12175 - DNA, 13 bp, Artificial Sequence
  synthetic sequence
ctcaaaaccattc

SEQ ID NO: 12176 - DNA, 13 bp, Artificial Sequence
  synthetic sequence
caattgtatctat

SEQ ID NO: 12177 - DNA, 13 bp, Artificial Sequence
  synthetic sequence
ttctccccacaca

SEQ ID NO: 12178 - DNA, 13 bp, Artificial Sequence
  synthetic sequence
gtgaagaaagaca

SEQ ID NO: 12179 - DNA, 13 bp, Artificial Sequence
  synthetic sequence
aacctttgtttca

SEQ ID NO: 12180 - DNA, 13 bp, Artificial Sequence
  synthetic sequence
tctgtaattggca

SEQ ID NO: 12181 - DNA, 13 bp, Artificial Sequence
  synthetic sequence
tgatatctcacag

SEQ ID NO: 12182 - DNA, 13 bp, Artificial Sequence
  synthetic sequence
tgagaagagggac

SEQ ID NO: 12183 - DNA, 13 bp, Artificial Sequence
  synthetic sequence
cctgagaagaaac

SEQ ID NO: 12184 - DNA, 13 bp, Artificial Sequence
  synthetic sequence
aacatttcattca

SEQ ID NO: 12185 - DNA, 13 bp, Artificial Sequence
  synthetic sequence
aagttctcaaatt

SEQ ID NO: 12186 - DNA, 13 bp, Artificial Sequence
  synthetic sequence
aatcaccaagtat

SEQ ID NO: 12187 - DNA, 13 bp, Artificial Sequence
  synthetic sequence
ctgctgaaaagag

SEQ ID NO: 12188 - DNA, 13 bp, Artificial Sequence
  synthetic sequence
catcagggatgat

SEQ ID NO: 12189 - DNA, 13 bp, Artificial Sequence
  synthetic sequence
tatacttttgttt

SEQ ID NO: 12190 - DNA, 13 bp, Artificial Sequence
  synthetic sequence
gtcatcattatca

SEQ ID NO: 12191 - DNA, 13 bp, Artificial Sequence
  synthetic sequence
caaagacctataa

SEQ ID NO: 12192 - DNA, 13 bp, Artificial Sequence
  synthetic sequence
tccatgctgtagt

SEQ ID NO: 12193 - DNA, 13 bp, Artificial Sequence
  synthetic sequence
attgtgtctattg

SEQ ID NO: 12194 - DNA, 13 bp, Artificial Sequence
  synthetic sequence
gtcccatgtcaat

SEQ ID NO: 12195 - DNA, 13 bp, Artificial Sequence
  synthetic sequence
gaggaaagacaca

SEQ ID NO: 12196 - DNA, 13 bp, Artificial Sequence
  synthetic sequence
gatgttttgaaca

SEQ ID NO: 12197 - DNA, 13 bp, Artificial Sequence
  synthetic sequence
atagatctgtcta

SEQ ID NO: 12198 - DNA, 13 bp, Artificial Sequence
  synthetic sequence
gatccaaagggaa

SEQ ID NO: 12199 - DNA, 13 bp, Artificial Sequence
  synthetic sequence
gaattgctcagtg

SEQ ID NO: 12200 - DNA, 13 bp, Artificial Sequence
  synthetic sequence
tcatagccctcaa

SEQ ID NO: 12201 - DNA, 13 bp, Artificial Sequence
  synthetic sequence
ctcccaattgaag

SEQ ID NO: 12202 - DNA, 13 bp, Artificial Sequence
  synthetic sequence
acctcttctgtac

SEQ ID NO: 12203 - DNA, 13 bp, Artificial Sequence
  synthetic sequence
ccttttcaccagt

SEQ ID NO: 12204 - DNA, 13 bp, Artificial Sequence
  synthetic sequence
gatgaaaagtctg

SEQ ID NO: 12205 - DNA, 13 bp, Artificial Sequence
  synthetic sequence
gacacaattcttc

SEQ ID NO: 12206 - DNA, 13 bp, Artificial Sequence
  synthetic sequence
ggtcaaggaattt

SEQ ID NO: 12207 - DNA, 13 bp, Artificial Sequence
  synthetic sequence
ttaacaagaatgg

SEQ ID NO: 12208 - DNA, 13 bp, Artificial Sequence
  synthetic sequence
ttctcaggctctg

SEQ ID NO: 12209 - DNA, 13 bp, Artificial Sequence
  synthetic sequence
tgatcttgcgtct

SEQ ID NO: 12210 - DNA, 13 bp, Artificial Sequence
  synthetic sequence
agaacatcaccaa

SEQ ID NO: 12211 - DNA, 13 bp, Artificial Sequence
  synthetic sequence
ccgattgcaaact

SEQ ID NO: 12212 - DNA, 13 bp, Artificial Sequence
  synthetic sequence
atcttccctgtta

SEQ ID NO: 12213 - DNA, 13 bp, Artificial Sequence
  synthetic sequence
ccgatctccctgt

SEQ ID NO: 12214 - DNA, 13 bp, Artificial Sequence
  synthetic sequence
ttttgcaatgaac

SEQ ID NO: 12215 - DNA, 13 bp, Artificial Sequence
  synthetic sequence
cttaatgttaaga

SEQ ID NO: 12216 - DNA, 13 bp, Artificial Sequence
  synthetic sequence
cacctttgagaca

SEQ ID NO: 12217 - DNA, 13 bp, Artificial Sequence
  synthetic sequence
aaggacttcctcc

SEQ ID NO: 12218 - DNA, 13 bp, Artificial Sequence
  synthetic sequence
tgaacttcttcat

SEQ ID NO: 12219 - DNA, 13 bp, Artificial Sequence
  synthetic sequence
tcacaaagtctga

SEQ ID NO: 12220 - DNA, 13 bp, Artificial Sequence
  synthetic sequence
gagaaaattggta

SEQ ID NO: 12221 - DNA, 13 bp, Artificial Sequence
  synthetic sequence
agtgctcctagat

SEQ ID NO: 12222 - DNA, 13 bp, Artificial Sequence
  synthetic sequence
ttctagttgttgc

SEQ ID NO: 12223 - DNA, 13 bp, Artificial Sequence
  synthetic sequence
tttcctccaacct

SEQ ID NO: 12224 - DNA, 13 bp, Artificial Sequence
  synthetic sequence
catctgctgggtc

SEQ ID NO: 12225 - DNA, 13 bp, Artificial Sequence
  synthetic sequence
ctatacaacgtga

SEQ ID NO: 12226 - DNA, 13 bp, Artificial Sequence
  synthetic sequence
tacttctgttttc

SEQ ID NO: 12227 - DNA, 13 bp, Artificial Sequence
  synthetic sequence
aactgttgtcata

SEQ ID NO: 12228 - DNA, 13 bp, Artificial Sequence
  synthetic sequence
agcctttcatact

SEQ ID NO: 12229 - DNA, 13 bp, Artificial Sequence
  synthetic sequence
gagactcacagag

SEQ ID NO: 12230 - DNA, 13 bp, Artificial Sequence
  synthetic sequence
aattcttcctttg

SEQ ID NO: 12231 - DNA, 13 bp, Artificial Sequence
  synthetic sequence
tgccattgttgaa

SEQ ID NO: 12232 - DNA, 13 bp, Artificial Sequence
  synthetic sequence
tgttggtgtcctc

SEQ ID NO: 12233 - DNA, 13 bp, Artificial Sequence
  synthetic sequence
tcaacagcttcac

SEQ ID NO: 12234 - DNA, 13 bp, Artificial Sequence
  synthetic sequence
catgcattttgtc

SEQ ID NO: 12235 - DNA, 13 bp, Artificial Sequence
  synthetic sequence
caactcttgaaga

SEQ ID NO: 12236 - DNA, 13 bp, Artificial Sequence
  synthetic sequence
acaaccacacttt

SEQ ID NO: 12237 - DNA, 13 bp, Artificial Sequence
  synthetic sequence
ttcttttctctat

SEQ ID NO: 12238 - DNA, 13 bp, Artificial Sequence
  synthetic sequence
acaaatgattgga

SEQ ID NO: 12239 - DNA, 13 bp, Artificial Sequence
  synthetic sequence
cattataccatca

SEQ ID NO: 12240 - DNA, 13 bp, Artificial Sequence
  synthetic sequence
accaatcaccctc

SEQ ID NO: 12241 - DNA, 13 bp, Artificial Sequence
  synthetic sequence
aggacttcttctg

SEQ ID NO: 12242 - DNA, 13 bp, Artificial Sequence
  synthetic sequence
caagtctcttctg

SEQ ID NO: 12243 - DNA, 13 bp, Artificial Sequence
  synthetic sequence
tgctgacatgatc

SEQ ID NO: 12244 - DNA, 13 bp, Artificial Sequence
  synthetic sequence
agacttgaatcag

SEQ ID NO: 12245 - DNA, 13 bp, Artificial Sequence
  synthetic sequence
attgagaactcca

SEQ ID NO: 12246 - DNA, 13 bp, Artificial Sequence
  synthetic sequence
ctctcaaattcag

SEQ ID NO: 12247 - DNA, 13 bp, Artificial Sequence
  synthetic sequence
ttattgtggagtt

SEQ ID NO: 12248 - DNA, 13 bp, Artificial Sequence
  synthetic sequence
ctattgaaaaggt

SEQ ID NO: 12249 - DNA, 13 bp, Artificial Sequence
  synthetic sequence
attctccagtttt

SEQ ID NO: 12250 - DNA, 13 bp, Artificial Sequence
  synthetic sequence
gcaacaaactctc

SEQ ID NO: 12251 - DNA, 13 bp, Artificial Sequence
  synthetic sequence
accactttcaaga

SEQ ID NO: 12252 - DNA, 13 bp, Artificial Sequence
  synthetic sequence
agtctgtctttaa

SEQ ID NO: 12253 - DNA, 13 bp, Artificial Sequence
  synthetic sequence
ataccggagctct

SEQ ID NO: 12254 - DNA, 13 bp, Artificial Sequence
  synthetic sequence
cttgagtctgacc

SEQ ID NO: 12255 - DNA, 13 bp, Artificial Sequence
  synthetic sequence
acattttgtcagt

SEQ ID NO: 12256 - DNA, 13 bp, Artificial Sequence
  synthetic sequence
ttcaaaatgaatg

SEQ ID NO: 12257 - DNA, 13 bp, Artificial Sequence
  synthetic sequence
caaaacactttat

SEQ ID NO: 12258 - DNA, 13 bp, Artificial Sequence
  synthetic sequence
tttcaaactctgt

SEQ ID NO: 12259 - DNA, 13 bp, Artificial Sequence
  synthetic sequence
ccaattcaagaga

SEQ ID NO: 12260 - DNA, 13 bp, Artificial Sequence
  synthetic sequence
tctgcttcctcat

SEQ ID NO: 12261 - DNA, 13 bp, Artificial Sequence
  synthetic sequence
aaactcagtgaat

SEQ ID NO: 12262 - DNA, 13 bp, Artificial Sequence
  synthetic sequence
agaatgaaattct

SEQ ID NO: 12263 - DNA, 13 bp, Artificial Sequence
  synthetic sequence
cttatacttatgc

SEQ ID NO: 12264 - DNA, 13 bp, Artificial Sequence
  synthetic sequence
aggtgtttaaagt

SEQ ID NO: 12265 - DNA, 13 bp, Artificial Sequence
  synthetic sequence
aaaccacttagat

SEQ ID NO: 12266 - DNA, 13 bp, Artificial Sequence
  synthetic sequence
tcagtattagtgt

SEQ ID NO: 12267 - DNA, 13 bp, Artificial Sequence
  synthetic sequence
cctcctaaacctg

SEQ ID NO: 12268 - DNA, 13 bp, Artificial Sequence
  synthetic sequence
gcacaggttccca

SEQ ID NO: 12269 - DNA, 13 bp, Artificial Sequence
  synthetic sequence
agtagctggtcct

SEQ ID NO: 12270 - DNA, 13 bp, Artificial Sequence
  synthetic sequence
cgagtatcaaggg

SEQ ID NO: 12271 - DNA, 13 bp, Artificial Sequence
  synthetic sequence
tctcattaatttt

SEQ ID NO: 12272 - DNA, 13 bp, Artificial Sequence
  synthetic sequence
agaatgtcatcat

SEQ ID NO: 12273 - DNA, 13 bp, Artificial Sequence
  synthetic sequence
actcatttatgga

SEQ ID NO: 12274 - DNA, 13 bp, Artificial Sequence
  synthetic sequence
tcccagtcaaact

SEQ ID NO: 12275 - DNA, 13 bp, Artificial Sequence
  synthetic sequence
tcaattgctctat

SEQ ID NO: 12276 - DNA, 13 bp, Artificial Sequence
  synthetic sequence
atctgtccatgca

SEQ ID NO: 12277 - DNA, 13 bp, Artificial Sequence
  synthetic sequence
atagcttgatcag

SEQ ID NO: 12278 - DNA, 13 bp, Artificial Sequence
  synthetic sequence
tcatttgttcata

SEQ ID NO: 12279 - DNA, 13 bp, Artificial Sequence
  synthetic sequence
ttctctcctttga

SEQ ID NO: 12280 - DNA, 13 bp, Artificial Sequence
  synthetic sequence
acttctgtgcacc

SEQ ID NO: 12281 - DNA, 13 bp, Artificial Sequence
  synthetic sequence
accaagtgtcaaa

SEQ ID NO: 12282 - DNA, 13 bp, Artificial Sequence
  synthetic sequence
ggaagttggcata

SEQ ID NO: 12283 - DNA, 13 bp, Artificial Sequence
  synthetic sequence
atcagtcgatttc

SEQ ID NO: 12284 - DNA, 13 bp, Artificial Sequence
  synthetic sequence
agatcagaaaata

SEQ ID NO: 12285 - DNA, 13 bp, Artificial Sequence
  synthetic sequence
aactctgcacatc

SEQ ID NO: 12286 - DNA, 13 bp, Artificial Sequence
  synthetic sequence
ctctatgaatttc

SEQ ID NO: 12287 - DNA, 13 bp, Artificial Sequence
  synthetic sequence
acatcacaccatc

SEQ ID NO: 12288 - DNA, 13 bp, Artificial Sequence
  synthetic sequence
tcaccacttttaa

SEQ ID NO: 12289 - DNA, 13 bp, Artificial Sequence
  synthetic sequence
tgtcacatgctca

SEQ ID NO: 12290 - DNA, 13 bp, Artificial Sequence
  synthetic sequence
agcctctcatact

SEQ ID NO: 12291 - DNA, 13 bp, Artificial Sequence
  synthetic sequence
gacacagaacatc

SEQ ID NO: 12292 - DNA, 13 bp, Artificial Sequence
  synthetic sequence
actctgagttaat

SEQ ID NO: 12293 - DNA, 13 bp, Artificial Sequence
  synthetic sequence
ataaaatctggat

SEQ ID NO: 12294 - DNA, 13 bp, Artificial Sequence
  synthetic sequence
atggaaacatctc

SEQ ID NO: 12295 - DNA, 13 bp, Artificial Sequence
  synthetic sequence
tcacaagttttct

SEQ ID NO: 12296 - DNA, 13 bp, Artificial Sequence
  synthetic sequence
tcttccttggtgc

SEQ ID NO: 12297 - DNA, 13 bp, Artificial Sequence
  synthetic sequence
gaacctctaagaa

SEQ ID NO: 12298 - DNA, 13 bp, Artificial Sequence
  synthetic sequence
gttgtctcataca

SEQ ID NO: 12299 - DNA, 13 bp, Artificial Sequence
  synthetic sequence
aagctcaagggag

SEQ ID NO: 12300 - DNA, 13 bp, Artificial Sequence
  synthetic sequence
gtatagagtaaca

SEQ ID NO: 12301 - DNA, 13 bp, Artificial Sequence
  synthetic sequence
aagaatttttcaa

SEQ ID NO: 12302 - DNA, 13 bp, Artificial Sequence
  synthetic sequence
aacatagcagcat

SEQ ID NO: 12303 - DNA, 13 bp, Artificial Sequence
  synthetic sequence
catatagtcccac

SEQ ID NO: 12304 - DNA, 13 bp, Artificial Sequence
  synthetic sequence
tttgaattcttgt

SEQ ID NO: 12305 - DNA, 13 bp, Artificial Sequence
  synthetic sequence
gtcataatcacaa

SEQ ID NO: 12306 - DNA, 13 bp, Artificial Sequence
  synthetic sequence
aaaaagctagaaa

SEQ ID NO: 12307 - DNA, 13 bp, Artificial Sequence
  synthetic sequence
ttttccatagccc

SEQ ID NO: 12308 - DNA, 13 bp, Artificial Sequence
  synthetic sequence
caaagtttgtttt

SEQ ID NO: 12309 - DNA, 13 bp, Artificial Sequence
  synthetic sequence
aattttggggtac

SEQ ID NO: 12310 - DNA, 13 bp, Artificial Sequence
  synthetic sequence
ctcaaaaagagca

SEQ ID NO: 12311 - DNA, 13 bp, Artificial Sequence
  synthetic sequence
ccttgccacataa

SEQ ID NO: 12312 - DNA, 13 bp, Artificial Sequence
  synthetic sequence
taaccttcaagtt

SEQ ID NO: 12313 - DNA, 13 bp, Artificial Sequence
  synthetic sequence
aggcattcatcca

SEQ ID NO: 12314 - DNA, 13 bp, Artificial Sequence
  synthetic sequence
acacctggacttt

SEQ ID NO: 12315 - DNA, 13 bp, Artificial Sequence
  synthetic sequence
cactcttgttgct

SEQ ID NO: 12316 - DNA, 13 bp, Artificial Sequence
  synthetic sequence
aaattctcaaact

SEQ ID NO: 12317 - DNA, 13 bp, Artificial Sequence
  synthetic sequence
tcagtgagatgca

SEQ ID NO: 12318 - DNA, 13 bp, Artificial Sequence
  synthetic sequence
tcatattcagtgc

SEQ ID NO: 12319 - DNA, 13 bp, Artificial Sequence
  synthetic sequence
gaataacaccttg

SEQ ID NO: 12320 - DNA, 13 bp, Artificial Sequence
  synthetic sequence
cccaatcaaatct

SEQ ID NO: 12321 - DNA, 13 bp, Artificial Sequence
  synthetic sequence
ttccctgccccat

SEQ ID NO: 12322 - DNA, 13 bp, Artificial Sequence
  synthetic sequence
acattatgccatc

SEQ ID NO: 12323 - DNA, 13 bp, Artificial Sequence
  synthetic sequence
tgaaatgcagatg

SEQ ID NO: 12324 - DNA, 13 bp, Artificial Sequence
  synthetic sequence
cttaaactctgca

SEQ ID NO: 12325 - DNA, 13 bp, Artificial Sequence
  synthetic sequence
ccctttagctggc

SEQ ID NO: 12326 - DNA, 13 bp, Artificial Sequence
  synthetic sequence
aagcctagaagga

SEQ ID NO: 12327 - DNA, 13 bp, Artificial Sequence
  synthetic sequence
tatgccttgcagg

SEQ ID NO: 12328 - DNA, 13 bp, Artificial Sequence
  synthetic sequence
ctaatggagggtc

SEQ ID NO: 12329 - DNA, 13 bp, Artificial Sequence
  synthetic sequence
aagccttgaggtc

SEQ ID NO: 12330 - DNA, 13 bp, Artificial Sequence
  synthetic sequence
ttctactcaattt

SEQ ID NO: 12331 - DNA, 13 bp, Artificial Sequence
  synthetic sequence
accgaatatccaa

SEQ ID NO: 12332 - DNA, 13 bp, Artificial Sequence
  synthetic sequence
tatcctatatacc

SEQ ID NO: 12333 - DNA, 13 bp, Artificial Sequence
  synthetic sequence
ccgctgtctcatt

SEQ ID NO: 12334 - DNA, 13 bp, Artificial Sequence
  synthetic sequence
attgtaagttgac

SEQ ID NO: 12335 - DNA, 13 bp, Artificial Sequence
  synthetic sequence
atcggagctataa

SEQ ID NO: 12336 - DNA, 13 bp, Artificial Sequence
  synthetic sequence
tgcagcaaattgg

SEQ ID NO: 12337 - DNA, 13 bp, Artificial Sequence
  synthetic sequence
cttccaattgcag

SEQ ID NO: 12338 - DNA, 13 bp, Artificial Sequence
  synthetic sequence
taagcaacatcac

SEQ ID NO: 12339 - DNA, 13 bp, Artificial Sequence
  synthetic sequence
tcttcgaagtgaa

SEQ ID NO: 12340 - DNA, 13 bp, Artificial Sequence
  synthetic sequence
tgaacaatatgtc

SEQ ID NO: 12341 - DNA, 13 bp, Artificial Sequence
  synthetic sequence
aatgcatccctcc

SEQ ID NO: 12342 - DNA, 13 bp, Artificial Sequence
  synthetic sequence
gcctagaaagata

SEQ ID NO: 12343 - DNA, 13 bp, Artificial Sequence
  synthetic sequence
ataaccagcttgc

SEQ ID NO: 12344 - DNA, 13 bp, Artificial Sequence
  synthetic sequence
taaggttaatgca

SEQ ID NO: 12345 - DNA, 13 bp, Artificial Sequence
  synthetic sequence
gaaggcacccaac

SEQ ID NO: 12346 - DNA, 13 bp, Artificial Sequence
  synthetic sequence
tggatttcagcat

SEQ ID NO: 12347 - DNA, 13 bp, Artificial Sequence
  synthetic sequence
aatattgcatcgc

SEQ ID NO: 12348 - DNA, 13 bp, Artificial Sequence
  synthetic sequence
tgtgtgaatatca

SEQ ID NO: 12349 - DNA, 13 bp, Artificial Sequence
  synthetic sequence
agaagaatcaact

SEQ ID NO: 12350 - DNA, 13 bp, Artificial Sequence
  synthetic sequence
ccttagttttgag

SEQ ID NO: 12351 - DNA, 13 bp, Artificial Sequence
  synthetic sequence
aactttgaaaata

SEQ ID NO: 12352 - DNA, 13 bp, Artificial Sequence
  synthetic sequence
gggaatgaacaat

SEQ ID NO: 12353 - DNA, 13 bp, Artificial Sequence
  synthetic sequence
gcagcacaagtaa

SEQ ID NO: 12354 - DNA, 13 bp, Artificial Sequence
  synthetic sequence
gtcaagcttttac

SEQ ID NO: 12355 - DNA, 13 bp, Artificial Sequence
  synthetic sequence
ctgtcgaagtcta

SEQ ID NO: 12356 - DNA, 13 bp, Artificial Sequence
  synthetic sequence
acaatcaaatgca

SEQ ID NO: 12357 - DNA, 13 bp, Artificial Sequence
  synthetic sequence
gcctagaatgaca

SEQ ID NO: 12358 - DNA, 13 bp, Artificial Sequence
  synthetic sequence
cggcattgtcacc

SEQ ID NO: 12359 - DNA, 13 bp, Artificial Sequence
  synthetic sequence
gcaggcaatatta

SEQ ID NO: 12360 - DNA, 13 bp, Artificial Sequence
  synthetic sequence
taagtttacaaga

SEQ ID NO: 12361 - DNA, 13 bp, Artificial Sequence
  synthetic sequence
aatcaccatgtta

SEQ ID NO: 12362 - DNA, 13 bp, Artificial Sequence
  synthetic sequence
tgatggtcaggtt

SEQ ID NO: 12363 - DNA, 13 bp, Artificial Sequence
  synthetic sequence
ttgcaacaattgt

SEQ ID NO: 12364 - DNA, 13 bp, Artificial Sequence
  synthetic sequence
aacactgttgtta

SEQ ID NO: 12365 - DNA, 13 bp, Artificial Sequence
  synthetic sequence
gaactttgtgagt

SEQ ID NO: 12366 - DNA, 13 bp, Artificial Sequence
  synthetic sequence
atctgcatctcat

SEQ ID NO: 12367 - DNA, 13 bp, Artificial Sequence
  synthetic sequence
cgtgcatttgtct

SEQ ID NO: 12368 - DNA, 13 bp, Artificial Sequence
  synthetic sequence
gtctgagacaatg

SEQ ID NO: 12369 - DNA, 13 bp, Artificial Sequence
  synthetic sequence
aagcccagcagca

SEQ ID NO: 12370 - DNA, 13 bp, Artificial Sequence
  synthetic sequence
ctctctgcctcat

SEQ ID NO: 12371 - DNA, 13 bp, Artificial Sequence
  synthetic sequence
taatagtattgat

SEQ ID NO: 12372 - DNA, 13 bp, Artificial Sequence
  synthetic sequence
tcttattgtattg

SEQ ID NO: 12373 - DNA, 13 bp, Artificial Sequence
  synthetic sequence
cagcaatgccaat

SEQ ID NO: 12374 - DNA, 13 bp, Artificial Sequence
  synthetic sequence
ttatgtacttaac

SEQ ID NO: 12375 - DNA, 13 bp, Artificial Sequence
  synthetic sequence
aattgaattatgg

SEQ ID NO: 12376 - DNA, 13 bp, Artificial Sequence
  synthetic sequence
tagataatgttgc

SEQ ID NO: 12377 - DNA, 13 bp, Artificial Sequence
  synthetic sequence
tttttctaaatct

SEQ ID NO: 12378 - DNA, 13 bp, Artificial Sequence
  synthetic sequence
agatcatcgacac

SEQ ID NO: 12379 - DNA, 13 bp, Artificial Sequence
  synthetic sequence
attcctgattatt

SEQ ID NO: 12380 - DNA, 13 bp, Artificial Sequence
  synthetic sequence
ggagttgatggtt

SEQ ID NO: 12381 - DNA, 13 bp, Artificial Sequence
  synthetic sequence
gcttgaaccactg

SEQ ID NO: 12382 - DNA, 13 bp, Artificial Sequence
  synthetic sequence
caaaccttttatg

SEQ ID NO: 12383 - DNA, 13 bp, Artificial Sequence
  synthetic sequence
tgagttacactct

SEQ ID NO: 12384 - DNA, 13 bp, Artificial Sequence
  synthetic sequence
atgcaggatgaat

SEQ ID NO: 12385 - DNA, 13 bp, Artificial Sequence
  synthetic sequence
cagaatgaatcac

SEQ ID NO: 12386 - DNA, 13 bp, Artificial Sequence
  synthetic sequence
tgatgtggtcttg

SEQ ID NO: 12387 - DNA, 13 bp, Artificial Sequence
  synthetic sequence
ggctcagcctctc

SEQ ID NO: 12388 - DNA, 13 bp, Artificial Sequence
  synthetic sequence
cttggaccactgc

SEQ ID NO: 12389 - DNA, 13 bp, Artificial Sequence
  synthetic sequence
ccgctattgcacg

SEQ ID NO: 12390 - DNA, 13 bp, Artificial Sequence
  synthetic sequence
caatgtaagccca

SEQ ID NO: 12391 - DNA, 13 bp, Artificial Sequence
  synthetic sequence
ttaggattagtac

SEQ ID NO: 12392 - DNA, 13 bp, Artificial Sequence
  synthetic sequence
ttgagtattgatt

SEQ ID NO: 12393 - DNA, 13 bp, Artificial Sequence
  synthetic sequence
ccaatttaaaatt

SEQ ID NO: 12394 - DNA, 13 bp, Artificial Sequence
  synthetic sequence
atatttatcttaa

SEQ ID NO: 12395 - DNA, 13 bp, Artificial Sequence
  synthetic sequence
taaatgcaggaag

SEQ ID NO: 12396 - DNA, 13 bp, Artificial Sequence
  synthetic sequence
gagtaatagctta

SEQ ID NO: 12397 - DNA, 13 bp, Artificial Sequence
  synthetic sequence
tcacagattggag

SEQ ID NO: 12398 - DNA, 13 bp, Artificial Sequence
  synthetic sequence
ttaattctgttag

SEQ ID NO: 12399 - DNA, 13 bp, Artificial Sequence
  synthetic sequence
gccaagtacagga

SEQ ID NO: 12400 - DNA, 13 bp, Artificial Sequence
  synthetic sequence
accagtatcagca

SEQ ID NO: 12401 - DNA, 13 bp, Artificial Sequence
  synthetic sequence
atatgaacaacat

SEQ ID NO: 12402 - DNA, 13 bp, Artificial Sequence
  synthetic sequence
ttaacaatagtgg

SEQ ID NO: 12403 - DNA, 13 bp, Artificial Sequence
  synthetic sequence
tcgtgggaagaag

SEQ ID NO: 12404 - DNA, 13 bp, Artificial Sequence
  synthetic sequence
ttgggcctggcaa

SEQ ID NO: 12405 - DNA, 13 bp, Artificial Sequence
  synthetic sequence
gaaagtggcaaat

SEQ ID NO: 12406 - DNA, 13 bp, Artificial Sequence
  synthetic sequence
agaggataagtgg

SEQ ID NO: 12407 - DNA, 13 bp, Artificial Sequence
  synthetic sequence
atactcattggac

SEQ ID NO: 12408 - DNA, 13 bp, Artificial Sequence
  synthetic sequence
tctgctactttta

SEQ ID NO: 12409 - DNA, 13 bp, Artificial Sequence
  synthetic sequence
cccagactgtacc

SEQ ID NO: 12410 - DNA, 13 bp, Artificial Sequence
  synthetic sequence
gtgaagaatcagc

SEQ ID NO: 12411 - DNA, 13 bp, Artificial Sequence
  synthetic sequence
gtggcttacatgg

SEQ ID NO: 12412 - DNA, 13 bp, Artificial Sequence
  synthetic sequence
ggtggtctgggat

SEQ ID NO: 12413 - DNA, 13 bp, Artificial Sequence
  synthetic sequence
ctttgtcaaaact

SEQ ID NO: 12414 - DNA, 13 bp, Artificial Sequence
  synthetic sequence
ctttagccccaga

SEQ ID NO: 12415 - DNA, 13 bp, Artificial Sequence
  synthetic sequence
ggctgctttttcc

SEQ ID NO: 12416 - DNA, 13 bp, Artificial Sequence
  synthetic sequence
cactgaaaccccg

SEQ ID NO: 12417 - DNA, 13 bp, Artificial Sequence
  synthetic sequence
agctgccatgtgg

SEQ ID NO: 12418 - DNA, 13 bp, Artificial Sequence
  synthetic sequence
tggagctatttag

SEQ ID NO: 12419 - DNA, 13 bp, Artificial Sequence
  synthetic sequence
aacaaatttgaag

SEQ ID NO: 12420 - DNA, 13 bp, Artificial Sequence
  synthetic sequence
attctgcagaagc

SEQ ID NO: 12421 - DNA, 13 bp, Artificial Sequence
  synthetic sequence
gaggggttattta

SEQ ID NO: 12422 - DNA, 13 bp, Artificial Sequence
  synthetic sequence
tgcaccattagtc

SEQ ID NO: 12423 - DNA, 13 bp, Artificial Sequence
  synthetic sequence
ggagagcagttta

SEQ ID NO: 12424 - DNA, 13 bp, Artificial Sequence
  synthetic sequence
ggtgacccaaaat

SEQ ID NO: 12425 - DNA, 13 bp, Artificial Sequence
  synthetic sequence
aatcctcaacctg

SEQ ID NO: 12426 - DNA, 13 bp, Artificial Sequence
  synthetic sequence
atttataaagcaa

SEQ ID NO: 12427 - DNA, 13 bp, Artificial Sequence
  synthetic sequence
gggtagatttcca

SEQ ID NO: 12428 - DNA, 13 bp, Artificial Sequence
  synthetic sequence
gacatggatatga

SEQ ID NO: 12429 - DNA, 13 bp, Artificial Sequence
  synthetic sequence
agttaaactttac

SEQ ID NO: 12430 - DNA, 13 bp, Artificial Sequence
  synthetic sequence
attttaagtgttt

SEQ ID NO: 12431 - DNA, 13 bp, Artificial Sequence
  synthetic sequence
aataaccttaaaa

SEQ ID NO: 12432 - DNA, 13 bp, Artificial Sequence
  synthetic sequence
atacagatcaaat

SEQ ID NO: 12433 - DNA, 13 bp, Artificial Sequence
  synthetic sequence
actaccttagttc

SEQ ID NO: 12434 - DNA, 13 bp, Artificial Sequence
  synthetic sequence
tcctccagtgccc

SEQ ID NO: 12435 - DNA, 13 bp, Artificial Sequence
  synthetic sequence
gcagaacctagag

SEQ ID NO: 12436 - DNA, 13 bp, Artificial Sequence
  synthetic sequence
gttgtgccattta

SEQ ID NO: 12437 - DNA, 13 bp, Artificial Sequence
  synthetic sequence
tagagtttcagca

SEQ ID NO: 12438 - DNA, 13 bp, Artificial Sequence
  synthetic sequence
gacaaaactggag

SEQ ID NO: 12439 - DNA, 13 bp, Artificial Sequence
  synthetic sequence
ctcagtttgcagc

SEQ ID NO: 12440 - DNA, 13 bp, Artificial Sequence
  synthetic sequence
agtgtagctgtgc

SEQ ID NO: 12441 - DNA, 13 bp, Artificial Sequence
  synthetic sequence
aaaggtgcagctg

SEQ ID NO: 12442 - DNA, 13 bp, Artificial Sequence
  synthetic sequence
tgggaaccactaa

SEQ ID NO: 12443 - DNA, 13 bp, Artificial Sequence
  synthetic sequence
aagccttaacagg

SEQ ID NO: 12444 - DNA, 13 bp, Artificial Sequence
  synthetic sequence
agcttattcaaat

SEQ ID NO: 12445 - DNA, 13 bp, Artificial Sequence
  synthetic sequence
cagataaatatgt

SEQ ID NO: 12446 - DNA, 13 bp, Artificial Sequence
  synthetic sequence
taattccatatga

SEQ ID NO: 12447 - DNA, 13 bp, Artificial Sequence
  synthetic sequence
tcatttcctgtga

SEQ ID NO: 12448 - DNA, 13 bp, Artificial Sequence
  synthetic sequence
tttggggctgaat

SEQ ID NO: 12449 - DNA, 13 bp, Artificial Sequence
  synthetic sequence
tgaaactttatgc

SEQ ID NO: 12450 - DNA, 13 bp, Artificial Sequence
  synthetic sequence
acagaaaagggat

SEQ ID NO: 12451 - DNA, 13 bp, Artificial Sequence
  synthetic sequence
aattccagggaaa

SEQ ID NO: 12452 - DNA, 13 bp, Artificial Sequence
  synthetic sequence
gttcctttattgg

SEQ ID NO: 12453 - DNA, 13 bp, Artificial Sequence
  synthetic sequence
tccacatgctttt

SEQ ID NO: 12454 - DNA, 13 bp, Artificial Sequence
  synthetic sequence
agaggatgggttt

SEQ ID NO: 12455 - DNA, 13 bp, Artificial Sequence
  synthetic sequence
catatgggtactt

SEQ ID NO: 12456 - DNA, 13 bp, Artificial Sequence
  synthetic sequence
tcattaaatggaa

SEQ ID NO: 12457 - DNA, 13 bp, Artificial Sequence
  synthetic sequence
tacatatggtaaa

SEQ ID NO: 12458 - DNA, 13 bp, Artificial Sequence
  synthetic sequence
acctgctcaaagt

SEQ ID NO: 12459 - DNA, 13 bp, Artificial Sequence
  synthetic sequence
accaagcccctac

SEQ ID NO: 12460 - DNA, 13 bp, Artificial Sequence
  synthetic sequence
tttctgaggcgtt

SEQ ID NO: 12461 - DNA, 13 bp, Artificial Sequence
  synthetic sequence
tacctcctgtacc

SEQ ID NO: 12462 - DNA, 13 bp, Artificial Sequence
  synthetic sequence
gagcaccaccagt

SEQ ID NO: 12463 - DNA, 13 bp, Artificial Sequence
  synthetic sequence
aaaagcccgctaa

SEQ ID NO: 12464 - DNA, 13 bp, Artificial Sequence
  synthetic sequence
agttcttcagagc

SEQ ID NO: 12465 - DNA, 13 bp, Artificial Sequence
  synthetic sequence
ataagggattgta

SEQ ID NO: 12466 - DNA, 13 bp, Artificial Sequence
  synthetic sequence
cttttgcagcttc

SEQ ID NO: 12467 - DNA, 13 bp, Artificial Sequence
  synthetic sequence
ggtagttgtacgc

SEQ ID NO: 12468 - DNA, 13 bp, Artificial Sequence
  synthetic sequence
gtggcacgtcaac

SEQ ID NO: 12469 - DNA, 13 bp, Artificial Sequence
  synthetic sequence
caatttctgatat

SEQ ID NO: 12470 - DNA, 13 bp, Artificial Sequence
  synthetic sequence
aaccccaactaac

SEQ ID NO: 12471 - DNA, 13 bp, Artificial Sequence
  synthetic sequence
tgcttgaaaccca

SEQ ID NO: 12472 - DNA, 13 bp, Artificial Sequence
  synthetic sequence
tttaaccctggcc

SEQ ID NO: 12473 - DNA, 13 bp, Artificial Sequence
  synthetic sequence
atctccatggggt

SEQ ID NO: 12474 - DNA, 13 bp, Artificial Sequence
  synthetic sequence
gctatacctaaag

SEQ ID NO: 12475 - DNA, 13 bp, Artificial Sequence
  synthetic sequence
tagctcacaaaaa

SEQ ID NO: 12476 - DNA, 13 bp, Artificial Sequence
  synthetic sequence
ttgtgttaggctg

SEQ ID NO: 12477 - DNA, 13 bp, Artificial Sequence
  synthetic sequence
cattcctggcaaa

SEQ ID NO: 12478 - DNA, 13 bp, Artificial Sequence
  synthetic sequence
tccatcaatatta

SEQ ID NO: 12479 - DNA, 13 bp, Artificial Sequence
  synthetic sequence
actttgaatttga

SEQ ID NO: 12480 - DNA, 13 bp, Artificial Sequence
  synthetic sequence
ctcctgaactggt

SEQ ID NO: 12481 - DNA, 13 bp, Artificial Sequence
  synthetic sequence
cccataaaaccac

SEQ ID NO: 12482 - DNA, 13 bp, Artificial Sequence
  synthetic sequence
ctttcatagtgaa

SEQ ID NO: 12483 - DNA, 13 bp, Artificial Sequence
  synthetic sequence
aaagtaatgtcac

SEQ ID NO: 12484 - DNA, 13 bp, Artificial Sequence
  synthetic sequence
actgtccatgact

SEQ ID NO: 12485 - DNA, 13 bp, Artificial Sequence
  synthetic sequence
acaaattgctgat

SEQ ID NO: 12486 - DNA, 13 bp, Artificial Sequence
  synthetic sequence
gtcttagtgtcaa

SEQ ID NO: 12487 - DNA, 13 bp, Artificial Sequence
  synthetic sequence
accccatgtcagg

SEQ ID NO: 12488 - DNA, 13 bp, Artificial Sequence
  synthetic sequence
tgtggcagctact

SEQ ID NO: 12489 - DNA, 13 bp, Artificial Sequence
  synthetic sequence
ccgttacaaaact

SEQ ID NO: 12490 - DNA, 13 bp, Artificial Sequence
  synthetic sequence
gtcaagcttagaa

SEQ ID NO: 12491 - DNA, 13 bp, Artificial Sequence
  synthetic sequence
gggccccaattta

SEQ ID NO: 12492 - DNA, 13 bp, Artificial Sequence
  synthetic sequence
catctcctactgt

SEQ ID NO: 12493 - DNA, 13 bp, Artificial Sequence
  synthetic sequence
gcccactttgtgg

SEQ ID NO: 12494 - DNA, 13 bp, Artificial Sequence
  synthetic sequence
tcatttatggctg

SEQ ID NO: 12495 - DNA, 13 bp, Artificial Sequence
  synthetic sequence
tctagtgttttga

SEQ ID NO: 12496 - DNA, 13 bp, Artificial Sequence
  synthetic sequence
agaaatggcattt

SEQ ID NO: 12497 - DNA, 13 bp, Artificial Sequence
  synthetic sequence
ttcagcgttacca

SEQ ID NO: 12498 - DNA, 13 bp, Artificial Sequence
  synthetic sequence
tgagaggttcctg

SEQ ID NO: 12499 - DNA, 13 bp, Artificial Sequence
  synthetic sequence
ggaagcacccttg

SEQ ID NO: 12500 - DNA, 13 bp, Artificial Sequence
  synthetic sequence
tggccatgacaga

SEQ ID NO: 12501 - DNA, 13 bp, Artificial Sequence
  synthetic sequence
gtgagtgactggc

SEQ ID NO: 12502 - DNA, 13 bp, Artificial Sequence
  synthetic sequence
tacgcgacactca

SEQ ID NO: 12503 - DNA, 13 bp, Artificial Sequence
  synthetic sequence
gcatctggaacaa

SEQ ID NO: 12504 - DNA, 13 bp, Artificial Sequence
  synthetic sequence
ggtcggatgaaca

SEQ ID NO: 12505 - DNA, 13 bp, Artificial Sequence
  synthetic sequence
tggtacatgtggc

SEQ ID NO: 12506 - DNA, 13 bp, Artificial Sequence
  synthetic sequence
accattggaggga

SEQ ID NO: 12507 - DNA, 13 bp, Artificial Sequence
  synthetic sequence
tggtggatgaaga

SEQ ID NO: 12508 - DNA, 13 bp, Artificial Sequence
  synthetic sequence
tcaatgtgctctc

SEQ ID NO: 12509 - DNA, 13 bp, Artificial Sequence
  synthetic sequence
gatgtggatggag

SEQ ID NO: 12510 - DNA, 13 bp, Artificial Sequence
  synthetic sequence
aatggaaagccag

SEQ ID NO: 12511 - DNA, 13 bp, Artificial Sequence
  synthetic sequence
ctcacggaattcc

SEQ ID NO: 12512 - DNA, 13 bp, Artificial Sequence
  synthetic sequence
aaggttgccaggc

SEQ ID NO: 12513 - DNA, 13 bp, Artificial Sequence
  synthetic sequence
tggtatgttcctc

SEQ ID NO: 12514 - DNA, 13 bp, Artificial Sequence
  synthetic sequence
gtacttcctgaat

SEQ ID NO: 12515 - DNA, 13 bp, Artificial Sequence
  synthetic sequence
tctgaaaagggta

SEQ ID NO: 12516 - DNA, 13 bp, Artificial Sequence
  synthetic sequence
ccatcacaaacat

SEQ ID NO: 12517 - DNA, 13 bp, Artificial Sequence
  synthetic sequence
actacagagacta

SEQ ID NO: 12518 - DNA, 13 bp, Artificial Sequence
  synthetic sequence
tggtttcgccata

SEQ ID NO: 12519 - DNA, 13 bp, Artificial Sequence
  synthetic sequence
tactggggcagct

SEQ ID NO: 12520 - DNA, 13 bp, Artificial Sequence
  synthetic sequence
gagcagacacaat

SEQ ID NO: 12521 - DNA, 13 bp, Artificial Sequence
  synthetic sequence
acaaggtgaaacc

SEQ ID NO: 12522 - DNA, 13 bp, Artificial Sequence
  synthetic sequence
cgagaccaggccc

SEQ ID NO: 12523 - DNA, 13 bp, Artificial Sequence
  synthetic sequence
cactgctggatgg

SEQ ID NO: 12524 - DNA, 13 bp, Artificial Sequence
  synthetic sequence
ggtcagtggagcc

SEQ ID NO: 12525 - DNA, 13 bp, Artificial Sequence
  synthetic sequence
tgggaagaagtgc

SEQ ID NO: 12526 - DNA, 13 bp, Artificial Sequence
  synthetic sequence
gtctcaactatct

SEQ ID NO: 12527 - DNA, 13 bp, Artificial Sequence
  synthetic sequence
ccaagctcgtgaa

SEQ ID NO: 12528 - DNA, 13 bp, Artificial Sequence
  synthetic sequence
accgctggctggg

SEQ ID NO: 12529 - DNA, 13 bp, Artificial Sequence
  synthetic sequence
gtggcggagcgca

SEQ ID NO: 12530 - DNA, 13 bp, Artificial Sequence
  synthetic sequence
ctgttcacatcac

SEQ ID NO: 12531 - DNA, 13 bp, Artificial Sequence
  synthetic sequence
ccatatgctctgc

SEQ ID NO: 12532 - DNA, 13 bp, Artificial Sequence
  synthetic sequence
ggggatcgggaca

SEQ ID NO: 12533 - DNA, 13 bp, Artificial Sequence
  synthetic sequence
ccgcactcctgcc

SEQ ID NO: 12534 - DNA, 13 bp, Artificial Sequence
  synthetic sequence
tgtgtgacatcgg

SEQ ID NO: 12535 - DNA, 13 bp, Artificial Sequence
  synthetic sequence
tggaaaaggtgag

SEQ ID NO: 12536 - DNA, 13 bp, Artificial Sequence
  synthetic sequence
acttgtgagggtc

SEQ ID NO: 12537 - DNA, 13 bp, Artificial Sequence
  synthetic sequence
aggatctggtgtg

SEQ ID NO: 12538 - DNA, 13 bp, Artificial Sequence
  synthetic sequence
ctgtacttcttga

SEQ ID NO: 12539 - DNA, 13 bp, Artificial Sequence
  synthetic sequence
aatggaaggccag

SEQ ID NO: 12540 - DNA, 13 bp, Artificial Sequence
  synthetic sequence
tcacgcaaaagtg

SEQ ID NO: 12541 - DNA, 13 bp, Artificial Sequence
  synthetic sequence
agaagcttggctg

SEQ ID NO: 12542 - DNA, 13 bp, Artificial Sequence
  synthetic sequence
ttggtgacatctg

SEQ ID NO: 12543 - DNA, 13 bp, Artificial Sequence
  synthetic sequence
gttggcagggcaa

SEQ ID NO: 12544 - DNA, 13 bp, Artificial Sequence
  synthetic sequence
gtggaaacctggc

SEQ ID NO: 12545 - DNA, 13 bp, Artificial Sequence
  synthetic sequence
ctatcagttcaca

SEQ ID NO: 12546 - DNA, 13 bp, Artificial Sequence
  synthetic sequence
tctagcttgagct

SEQ ID NO: 12547 - DNA, 13 bp, Artificial Sequence
  synthetic sequence
gttctccttccat

SEQ ID NO: 12548 - DNA, 13 bp, Artificial Sequence
  synthetic sequence
tctctttcccatc

SEQ ID NO: 12549 - DNA, 13 bp, Artificial Sequence
  synthetic sequence
ttccatcatgcgg

SEQ ID NO: 12550 - DNA, 13 bp, Artificial Sequence
  synthetic sequence
atgaccagccccc

SEQ ID NO: 12551 - DNA, 13 bp, Artificial Sequence
  synthetic sequence
ccatcccactcct

SEQ ID NO: 12552 - DNA, 13 bp, Artificial Sequence
  synthetic sequence
ttggacaggcagg

SEQ ID NO: 12553 - DNA, 13 bp, Artificial Sequence
  synthetic sequence
tcaaactcaagga

SEQ ID NO: 12554 - DNA, 13 bp, Artificial Sequence
  synthetic sequence
gggcctttgtgtc

SEQ ID NO: 12555 - DNA, 13 bp, Artificial Sequence
  synthetic sequence
gcacctggatggg

SEQ ID NO: 12556 - DNA, 13 bp, Artificial Sequence
  synthetic sequence
ttccatgtgaggg

SEQ ID NO: 12557 - DNA, 13 bp, Artificial Sequence
  synthetic sequence
tccatcacacatc

SEQ ID NO: 12558 - DNA, 13 bp, Artificial Sequence
  synthetic sequence
tacggggccaaca

SEQ ID NO: 12559 - DNA, 13 bp, Artificial Sequence
  synthetic sequence
gagggctcccact

SEQ ID NO: 12560 - DNA, 13 bp, Artificial Sequence
  synthetic sequence
cccagatgttctt

SEQ ID NO: 12561 - DNA, 13 bp, Artificial Sequence
  synthetic sequence
tccaaggccagct

SEQ ID NO: 12562 - DNA, 13 bp, Artificial Sequence
  synthetic sequence
catccttcatcac

SEQ ID NO: 12563 - DNA, 13 bp, Artificial Sequence
  synthetic sequence
actgcctcttttg

SEQ ID NO: 12564 - DNA, 13 bp, Artificial Sequence
  synthetic sequence
tcatctccactca

SEQ ID NO: 12565 - DNA, 13 bp, Artificial Sequence
  synthetic sequence
ccttctctggatc

SEQ ID NO: 12566 - DNA, 13 bp, Artificial Sequence
  synthetic sequence
tttcccgtgacgg

SEQ ID NO: 12567 - DNA, 13 bp, Artificial Sequence
  synthetic sequence
gcatggatgctcc

SEQ ID NO: 12568 - DNA, 13 bp, Artificial Sequence
  synthetic sequence
ttgttccttcagg

SEQ ID NO: 12569 - DNA, 13 bp, Artificial Sequence
  synthetic sequence
ggctcggctgtga

SEQ ID NO: 12570 - DNA, 13 bp, Artificial Sequence
  synthetic sequence
acctgccgccatc

SEQ ID NO: 12571 - DNA, 13 bp, Artificial Sequence
  synthetic sequence
ctttggtacacat

SEQ ID NO: 12572 - DNA, 13 bp, Artificial Sequence
  synthetic sequence
tactgttccctca

SEQ ID NO: 12573 - DNA, 13 bp, Artificial Sequence
  synthetic sequence
atactgccaaccc

SEQ ID NO: 12574 - DNA, 13 bp, Artificial Sequence
  synthetic sequence
tcattccaagttc

SEQ ID NO: 12575 - DNA, 13 bp, Artificial Sequence
  synthetic sequence
gaattaacaagat

SEQ ID NO: 12576 - DNA, 13 bp, Artificial Sequence
  synthetic sequence
gatgctccaagtg

SEQ ID NO: 12577 - DNA, 13 bp, Artificial Sequence
  synthetic sequence
atcactcttcggc

SEQ ID NO: 12578 - DNA, 13 bp, Artificial Sequence
  synthetic sequence
cactgcttctttc

SEQ ID NO: 12579 - DNA, 13 bp, Artificial Sequence
  synthetic sequence
tcgtctccactca

SEQ ID NO: 12580 - DNA, 13 bp, Artificial Sequence
  synthetic sequence
taaccatgcaagt

SEQ ID NO: 12581 - DNA, 13 bp, Artificial Sequence
  synthetic sequence
gtgacacggctaa

SEQ ID NO: 12582 - DNA, 13 bp, Artificial Sequence
  synthetic sequence
ttggcccattccg

SEQ ID NO: 12583 - DNA, 13 bp, Artificial Sequence
  synthetic sequence
catctttcatcac

SEQ ID NO: 12584 - DNA, 13 bp, Artificial Sequence
  synthetic sequence
tgagcgaagccgc

SEQ ID NO: 12585 - DNA, 13 bp, Artificial Sequence
  synthetic sequence
ttttgtgtcaact

SEQ ID NO: 12586 - DNA, 13 bp, Artificial Sequence
  synthetic sequence
gaaccttggccat

SEQ ID NO: 12587 - DNA, 13 bp, Artificial Sequence
  synthetic sequence
tgcgtgagtttcc

SEQ ID NO: 12588 - DNA, 13 bp, Artificial Sequence
  synthetic sequence
ccctaagatcaaa

SEQ ID NO: 12589 - DNA, 13 bp, Artificial Sequence
  synthetic sequence
gcagagaaagtcc

SEQ ID NO: 12590 - DNA, 13 bp, Artificial Sequence
  synthetic sequence
gctaatcagcttc

SEQ ID NO: 12591 - DNA, 13 bp, Artificial Sequence
  synthetic sequence
cattttgttacaa

SEQ ID NO: 12592 - DNA, 13 bp, Artificial Sequence
  synthetic sequence
agatggggagagc

SEQ ID NO: 12593 - DNA, 13 bp, Artificial Sequence
  synthetic sequence
gaagttccatggg

SEQ ID NO: 12594 - DNA, 13 bp, Artificial Sequence
  synthetic sequence
tggagatgaaagt

SEQ ID NO: 12595 - DNA, 13 bp, Artificial Sequence
  synthetic sequence
aactgctgggtga

SEQ ID NO: 12596 - DNA, 13 bp, Artificial Sequence
  synthetic sequence
gaatgcatgagtt

SEQ ID NO: 12597 - DNA, 13 bp, Artificial Sequence
  synthetic sequence
cttgctgggcctt

SEQ ID NO: 12598 - DNA, 13 bp, Artificial Sequence
  synthetic sequence
gatgatgatgaat

SEQ ID NO: 12599 - DNA, 13 bp, Artificial Sequence
  synthetic sequence
acaatgatctcag

SEQ ID NO: 12600 - DNA, 13 bp, Artificial Sequence
  synthetic sequence
caaacgttgagat

SEQ ID NO: 12601 - DNA, 13 bp, Artificial Sequence
  synthetic sequence
gtcagagcagccc

SEQ ID NO: 12602 - DNA, 13 bp, Artificial Sequence
  synthetic sequence
aagtggaatgacc

SEQ ID NO: 12603 - DNA, 13 bp, Artificial Sequence
  synthetic sequence
atgggtgcagagg

SEQ ID NO: 12604 - DNA, 13 bp, Artificial Sequence
  synthetic sequence
tacagagaccaga

SEQ ID NO: 12605 - DNA, 13 bp, Artificial Sequence
  synthetic sequence
agaagaggtcagg

SEQ ID NO: 12606 - DNA, 13 bp, Artificial Sequence
  synthetic sequence
attgagaggatgc

SEQ ID NO: 12607 - DNA, 13 bp, Artificial Sequence
  synthetic sequence
ggtgatcacgttg

SEQ ID NO: 12608 - DNA, 13 bp, Artificial Sequence
  synthetic sequence
tgaagaaggagct

SEQ ID NO: 12609 - DNA, 13 bp, Artificial Sequence
  synthetic sequence
gggcaacagatga

SEQ ID NO: 12610 - DNA, 13 bp, Artificial Sequence
  synthetic sequence
tgtcagacaagtg

SEQ ID NO: 12611 - DNA, 13 bp, Artificial Sequence
  synthetic sequence
caaataaattggt

SEQ ID NO: 12612 - DNA, 13 bp, Artificial Sequence
  synthetic sequence
atatcctggggtg

SEQ ID NO: 12613 - DNA, 13 bp, Artificial Sequence
  synthetic sequence
tagatgtggaaga

SEQ ID NO: 12614 - DNA, 13 bp, Artificial Sequence
  synthetic sequence
ggtgggtcattct

SEQ ID NO: 12615 - DNA, 13 bp, Artificial Sequence
  synthetic sequence
caacatttgatgt

SEQ ID NO: 12616 - DNA, 13 bp, Artificial Sequence
  synthetic sequence
agatattggatgc

SEQ ID NO: 12617 - DNA, 13 bp, Artificial Sequence
  synthetic sequence
ctgagttcaactt

SEQ ID NO: 12618 - DNA, 13 bp, Artificial Sequence
  synthetic sequence
cattccaggctgc

SEQ ID NO: 12619 - DNA, 13 bp, Artificial Sequence
  synthetic sequence
ataccagagaact

SEQ ID NO: 12620 - DNA, 13 bp, Artificial Sequence
  synthetic sequence
ctctttgggccag

SEQ ID NO: 12621 - DNA, 13 bp, Artificial Sequence
  synthetic sequence
cagaagcaactct

SEQ ID NO: 12622 - DNA, 13 bp, Artificial Sequence
  synthetic sequence
atccagaagtttg

SEQ ID NO: 12623 - DNA, 13 bp, Artificial Sequence
  synthetic sequence
aacctctgcaagt

SEQ ID NO: 12624 - DNA, 13 bp, Artificial Sequence
  synthetic sequence
atataatcatgga

SEQ ID NO: 12625 - DNA, 13 bp, Artificial Sequence
  synthetic sequence
gagaaactcatca

SEQ ID NO: 12626 - DNA, 13 bp, Artificial Sequence
  synthetic sequence
gagaattggtatg

SEQ ID NO: 12627 - DNA, 13 bp, Artificial Sequence
  synthetic sequence
cccagcatgttag

SEQ ID NO: 12628 - DNA, 13 bp, Artificial Sequence
  synthetic sequence
gaactgatttgca

SEQ ID NO: 12629 - DNA, 13 bp, Artificial Sequence
  synthetic sequence
atggatgagctaa

SEQ ID NO: 12630 - DNA, 13 bp, Artificial Sequence
  synthetic sequence
ctggaactttgtt

SEQ ID NO: 12631 - DNA, 13 bp, Artificial Sequence
  synthetic sequence
taaatcagtatag

SEQ ID NO: 12632 - DNA, 13 bp, Artificial Sequence
  synthetic sequence
tattaaactgctt

SEQ ID NO: 12633 - DNA, 13 bp, Artificial Sequence
  synthetic sequence
gagaggcttcatg

SEQ ID NO: 12634 - DNA, 13 bp, Artificial Sequence
  synthetic sequence
tcctgagacacat

SEQ ID NO: 12635 - DNA, 13 bp, Artificial Sequence
  synthetic sequence
catgtcaagccta

SEQ ID NO: 12636 - DNA, 13 bp, Artificial Sequence
  synthetic sequence
tacacaccattca

SEQ ID NO: 12637 - DNA, 13 bp, Artificial Sequence
  synthetic sequence
gggatgcaaccca

SEQ ID NO: 12638 - DNA, 13 bp, Artificial Sequence
  synthetic sequence
atctaatgataga

SEQ ID NO: 12639 - DNA, 13 bp, Artificial Sequence
  synthetic sequence
agataccatagag

SEQ ID NO: 12640 - DNA, 13 bp, Artificial Sequence
  synthetic sequence
ctttctgggatgt

SEQ ID NO: 12641 - DNA, 13 bp, Artificial Sequence
  synthetic sequence
tcactcgtagtgt

SEQ ID NO: 12642 - DNA, 13 bp, Artificial Sequence
  synthetic sequence
cagaaacgtgtag

SEQ ID NO: 12643 - DNA, 13 bp, Artificial Sequence
  synthetic sequence
gggatactatgct

SEQ ID NO: 12644 - DNA, 13 bp, Artificial Sequence
  synthetic sequence
atcataacagagc

SEQ ID NO: 12645 - DNA, 13 bp, Artificial Sequence
  synthetic sequence
tctttatgttgtt

SEQ ID NO: 12646 - DNA, 13 bp, Artificial Sequence
  synthetic sequence
acaggagtaaaca

SEQ ID NO: 12647 - DNA, 13 bp, Artificial Sequence
  synthetic sequence
ctccctggctgtc

SEQ ID NO: 12648 - DNA, 13 bp, Artificial Sequence
  synthetic sequence
ggagcaaatagac

SEQ ID NO: 12649 - DNA, 13 bp, Artificial Sequence
  synthetic sequence
tattcgagagctc

SEQ ID NO: 12650 - DNA, 13 bp, Artificial Sequence
  synthetic sequence
aaatgagagacag

SEQ ID NO: 12651 - DNA, 13 bp, Artificial Sequence
  synthetic sequence
gatggcaaagatc

SEQ ID NO: 12652 - DNA, 13 bp, Artificial Sequence
  synthetic sequence
aacagagcactac

SEQ ID NO: 12653 - DNA, 13 bp, Artificial Sequence
  synthetic sequence
gctagtattggaa

SEQ ID NO: 12654 - DNA, 13 bp, Artificial Sequence
  synthetic sequence
tatcggcatggtg

SEQ ID NO: 12655 - DNA, 13 bp, Artificial Sequence
  synthetic sequence
gatgaggatgtca

SEQ ID NO: 12656 - DNA, 13 bp, Artificial Sequence
  synthetic sequence
tatgatgcgttaa

SEQ ID NO: 12657 - DNA, 13 bp, Artificial Sequence
  synthetic sequence
caggtaccataga

SEQ ID NO: 12658 - DNA, 13 bp, Artificial Sequence
  synthetic sequence
actcgtagtgtgt

SEQ ID NO: 12659 - DNA, 13 bp, Artificial Sequence
  synthetic sequence
tcagagatgcaac

SEQ ID NO: 12660 - DNA, 13 bp, Artificial Sequence
  synthetic sequence
agactgagccttc

SEQ ID NO: 12661 - DNA, 13 bp, Artificial Sequence
  synthetic sequence
catggcatcaggg

SEQ ID NO: 12662 - DNA, 13 bp, Artificial Sequence
  synthetic sequence
aacatgttaagcc

SEQ ID NO: 12663 - DNA, 13 bp, Artificial Sequence
  synthetic sequence
cggtccttgtcct

SEQ ID NO: 12664 - DNA, 13 bp, Artificial Sequence
  synthetic sequence
atggagttgggat

SEQ ID NO: 12665 - DNA, 13 bp, Artificial Sequence
  synthetic sequence
tgacttgttcagg

SEQ ID NO: 12666 - DNA, 13 bp, Artificial Sequence
  synthetic sequence
cagaactgtcatc

SEQ ID NO: 12667 - DNA, 13 bp, Artificial Sequence
  synthetic sequence
tctcaggtcagag

SEQ ID NO: 12668 - DNA, 13 bp, Artificial Sequence
  synthetic sequence
gagtgttccttgg

SEQ ID NO: 12669 - DNA, 13 bp, Artificial Sequence
  synthetic sequence
tttaatctcttca

SEQ ID NO: 12670 - DNA, 13 bp, Artificial Sequence
  synthetic sequence
actccactgaata

SEQ ID NO: 12671 - DNA, 13 bp, Artificial Sequence
  synthetic sequence
aactgaagagttg

SEQ ID NO: 12672 - DNA, 13 bp, Artificial Sequence
  synthetic sequence
gaggattgcatga

SEQ ID NO: 12673 - DNA, 13 bp, Artificial Sequence
  synthetic sequence
attctcaagagaa

SEQ ID NO: 12674 - DNA, 13 bp, Artificial Sequence
  synthetic sequence
tagaccaacgatc

SEQ ID NO: 12675 - DNA, 13 bp, Artificial Sequence
  synthetic sequence
aactacacaaggg

SEQ ID NO: 12676 - DNA, 13 bp, Artificial Sequence
  synthetic sequence
aagcttactaacc

SEQ ID NO: 12677 - DNA, 13 bp, Artificial Sequence
  synthetic sequence
tctctttgggcct

SEQ ID NO: 12678 - DNA, 13 bp, Artificial Sequence
  synthetic sequence
acgtttgatgtct

SEQ ID NO: 12679 - DNA, 13 bp, Artificial Sequence
  synthetic sequence
gcactatgctagt

SEQ ID NO: 12680 - DNA, 13 bp, Artificial Sequence
  synthetic sequence
ttgctcatctcag

SEQ ID NO: 12681 - DNA, 13 bp, Artificial Sequence
  synthetic sequence
tgcatcatctgat

SEQ ID NO: 12682 - DNA, 13 bp, Artificial Sequence
  synthetic sequence
attcagatatgtg

SEQ ID NO: 12683 - DNA, 13 bp, Artificial Sequence
  synthetic sequence
tgctcattaaaga

SEQ ID NO: 12684 - DNA, 13 bp, Artificial Sequence
  synthetic sequence
cacaaagtcatct

SEQ ID NO: 12685 - DNA, 13 bp, Artificial Sequence
  synthetic sequence
tcatcttgtgagg

SEQ ID NO: 12686 - DNA, 13 bp, Artificial Sequence
  synthetic sequence
gagaaattgtcac

SEQ ID NO: 12687 - DNA, 13 bp, Artificial Sequence
  synthetic sequence
tctaattcctcaa

SEQ ID NO: 12688 - DNA, 13 bp, Artificial Sequence
  synthetic sequence
cagatgctccttg

SEQ ID NO: 12689 - DNA, 13 bp, Artificial Sequence
  synthetic sequence
ctagtgtttccac

SEQ ID NO: 12690 - DNA, 13 bp, Artificial Sequence
  synthetic sequence
gcttgctttccat

SEQ ID NO: 12691 - DNA, 13 bp, Artificial Sequence
  synthetic sequence
ggaacctcatact

SEQ ID NO: 12692 - DNA, 13 bp, Artificial Sequence
  synthetic sequence
ctgggcatccaaa

SEQ ID NO: 12693 - DNA, 13 bp, Artificial Sequence
  synthetic sequence
atgctgttgtttc

SEQ ID NO: 12694 - DNA, 13 bp, Artificial Sequence
  synthetic sequence
caaaatctgtgtt

SEQ ID NO: 12695 - DNA, 13 bp, Artificial Sequence
  synthetic sequence
gcagctgagccct

SEQ ID NO: 12696 - DNA, 13 bp, Artificial Sequence
  synthetic sequence
actctctctcagt

SEQ ID NO: 12697 - DNA, 13 bp, Artificial Sequence
  synthetic sequence
aagaacttcccta

SEQ ID NO: 12698 - DNA, 13 bp, Artificial Sequence
  synthetic sequence
tattttgacatct

SEQ ID NO: 12699 - DNA, 13 bp, Artificial Sequence
  synthetic sequence
gataatgaactga

SEQ ID NO: 12700 - DNA, 13 bp, Artificial Sequence
  synthetic sequence
agcatgtaatgga

SEQ ID NO: 12701 - DNA, 13 bp, Artificial Sequence
  synthetic sequence
ggttgtttgtgac

SEQ ID NO: 12702 - DNA, 13 bp, Artificial Sequence
  synthetic sequence
ctgggcctgttct

SEQ ID NO: 12703 - DNA, 13 bp, Artificial Sequence
  synthetic sequence
aaggatggctgat

SEQ ID NO: 12704 - DNA, 13 bp, Artificial Sequence
  synthetic sequence
gagcaccgacctg

SEQ ID NO: 12705 - DNA, 13 bp, Artificial Sequence
  synthetic sequence
tccctctcaaata

SEQ ID NO: 12706 - DNA, 13 bp, Artificial Sequence
  synthetic sequence
actgtggtctaag

SEQ ID NO: 12707 - DNA, 13 bp, Artificial Sequence
  synthetic sequence
gagaatggtgctt

SEQ ID NO: 12708 - DNA, 13 bp, Artificial Sequence
  synthetic sequence
agctaagtggcca

SEQ ID NO: 12709 - DNA, 13 bp, Artificial Sequence
  synthetic sequence
acaaatgagaaca

SEQ ID NO: 12710 - DNA, 13 bp, Artificial Sequence
  synthetic sequence
tggcttttgctgg

SEQ ID NO: 12711 - DNA, 13 bp, Artificial Sequence
  synthetic sequence
tatctgtctcttc

SEQ ID NO: 12712 - DNA, 13 bp, Artificial Sequence
  synthetic sequence
actgcattgccag

SEQ ID NO: 12713 - DNA, 13 bp, Artificial Sequence
  synthetic sequence
aacaacagctgat

SEQ ID NO: 12714 - DNA, 13 bp, Artificial Sequence
  synthetic sequence
tcccttcagcaaa

SEQ ID NO: 12715 - DNA, 13 bp, Artificial Sequence
  synthetic sequence
ttgtcaagcagga

SEQ ID NO: 12716 - DNA, 13 bp, Artificial Sequence
  synthetic sequence
gcttctttccatt

SEQ ID NO: 12717 - DNA, 13 bp, Artificial Sequence
  synthetic sequence
tcttcttaagaat

SEQ ID NO: 12718 - DNA, 13 bp, Artificial Sequence
  synthetic sequence
acttgtggtcatt

SEQ ID NO: 12719 - DNA, 13 bp, Artificial Sequence
  synthetic sequence
gcttcagagtcct

SEQ ID NO: 12720 - DNA, 13 bp, Artificial Sequence
  synthetic sequence
ttgggggctgtcc

SEQ ID NO: 12721 - DNA, 13 bp, Artificial Sequence
  synthetic sequence
gttgtctcttgat

SEQ ID NO: 12722 - DNA, 13 bp, Artificial Sequence
  synthetic sequence
gcatgtcatccgc

SEQ ID NO: 12723 - DNA, 13 bp, Artificial Sequence
  synthetic sequence
agctaagaattag

SEQ ID NO: 12724 - DNA, 13 bp, Artificial Sequence
  synthetic sequence
ttgaaaaccctgg

SEQ ID NO: 12725 - DNA, 13 bp, Artificial Sequence
  synthetic sequence
tgttgtacatgcc

SEQ ID NO: 12726 - DNA, 13 bp, Artificial Sequence
  synthetic sequence
gctgtagcttata

SEQ ID NO: 12727 - DNA, 13 bp, Artificial Sequence
  synthetic sequence
aatgcttctgccc

SEQ ID NO: 12728 - DNA, 13 bp, Artificial Sequence
  synthetic sequence
gggcaaactcaag

SEQ ID NO: 12729 - DNA, 13 bp, Artificial Sequence
  synthetic sequence
cccctaatgatca

SEQ ID NO: 12730 - DNA, 13 bp, Artificial Sequence
  synthetic sequence
agggttaataaag

SEQ ID NO: 12731 - DNA, 13 bp, Artificial Sequence
  synthetic sequence
ctttctagagtca

SEQ ID NO: 12732 - DNA, 13 bp, Artificial Sequence
  synthetic sequence
gttgtggtttcca

SEQ ID NO: 12733 - DNA, 13 bp, Artificial Sequence
  synthetic sequence
accatttggcacc

SEQ ID NO: 12734 - DNA, 13 bp, Artificial Sequence
  synthetic sequence
ttgcacatgggat

SEQ ID NO: 12735 - DNA, 13 bp, Artificial Sequence
  synthetic sequence
tgatatactctga

SEQ ID NO: 12736 - DNA, 13 bp, Artificial Sequence
  synthetic sequence
actttgcatctgg

SEQ ID NO: 12737 - DNA, 13 bp, Artificial Sequence
  synthetic sequence
aatctctgaagga

SEQ ID NO: 12738 - DNA, 13 bp, Artificial Sequence
  synthetic sequence
gattgcaagcctc

SEQ ID NO: 12739 - DNA, 13 bp, Artificial Sequence
  synthetic sequence
agcaagctgtact

SEQ ID NO: 12740 - DNA, 13 bp, Artificial Sequence
  synthetic sequence
taacatccaactc

SEQ ID NO: 12741 - DNA, 13 bp, Artificial Sequence
  synthetic sequence
tgcaattgacaac

SEQ ID NO: 12742 - DNA, 13 bp, Artificial Sequence
  synthetic sequence
ccatcttttgtag

SEQ ID NO: 12743 - DNA, 13 bp, Artificial Sequence
  synthetic sequence
gcttggcatgatt

SEQ ID NO: 12744 - DNA, 13 bp, Artificial Sequence
  synthetic sequence
atcccaatcaaat

SEQ ID NO: 12745 - DNA, 13 bp, Artificial Sequence
  synthetic sequence
cgggaggagaaga

SEQ ID NO: 12746 - DNA, 13 bp, Artificial Sequence
  synthetic sequence
aagcatatggctg

SEQ ID NO: 12747 - DNA, 13 bp, Artificial Sequence
  synthetic sequence
catctaatccctg

SEQ ID NO: 12748 - DNA, 13 bp, Artificial Sequence
  synthetic sequence
ccatttgacacca

SEQ ID NO: 12749 - DNA, 13 bp, Artificial Sequence
  synthetic sequence
ccttaagtgtggc

SEQ ID NO: 12750 - DNA, 13 bp, Artificial Sequence
  synthetic sequence
ctgcatcatccct

SEQ ID NO: 12751 - DNA, 13 bp, Artificial Sequence
  synthetic sequence
actcccgaaagag

SEQ ID NO: 12752 - DNA, 13 bp, Artificial Sequence
  synthetic sequence
ttgtcttccaaaa

SEQ ID NO: 12753 - DNA, 13 bp, Artificial Sequence
  synthetic sequence
tgatcagtggcca

SEQ ID NO: 12754 - DNA, 13 bp, Artificial Sequence
  synthetic sequence
cccaaaatgagaa

SEQ ID NO: 12755 - DNA, 13 bp, Artificial Sequence
  synthetic sequence
tacatgccagatg

SEQ ID NO: 12756 - DNA, 13 bp, Artificial Sequence
  synthetic sequence
tgtcattttctat

SEQ ID NO: 12757 - DNA, 13 bp, Artificial Sequence
  synthetic sequence
catctgtctcctc

SEQ ID NO: 12758 - DNA, 13 bp, Artificial Sequence
  synthetic sequence
atctaactctatg

SEQ ID NO: 12759 - DNA, 13 bp, Artificial Sequence
  synthetic sequence
tcctagatcccca

SEQ ID NO: 12760 - DNA, 13 bp, Artificial Sequence
  synthetic sequence
ctttagattgttg

SEQ ID NO: 12761 - DNA, 13 bp, Artificial Sequence
  synthetic sequence
aaagcagctatgt

SEQ ID NO: 12762 - DNA, 13 bp, Artificial Sequence
  synthetic sequence
acgcataagggtt

SEQ ID NO: 12763 - DNA, 13 bp, Artificial Sequence
  synthetic sequence
acctgctattctc

SEQ ID NO: 12764 - DNA, 13 bp, Artificial Sequence
  synthetic sequence
cctctgcttcaga

SEQ ID NO: 12765 - DNA, 13 bp, Artificial Sequence
  synthetic sequence
ccattgtaacaac

SEQ ID NO: 12766 - DNA, 13 bp, Artificial Sequence
  synthetic sequence
cttatagctctca

SEQ ID NO: 12767 - DNA, 13 bp, Artificial Sequence
  synthetic sequence
agcatctatgtag

SEQ ID NO: 12768 - DNA, 13 bp, Artificial Sequence
  synthetic sequence
ctaaggttgtctt

SEQ ID NO: 12769 - DNA, 13 bp, Artificial Sequence
  synthetic sequence
ccacaggttgcac

SEQ ID NO: 12770 - DNA, 13 bp, Artificial Sequence
  synthetic sequence
gaccaaaggtgaa

SEQ ID NO: 12771 - DNA, 13 bp, Artificial Sequence
  synthetic sequence
tagtctttgctgg

SEQ ID NO: 12772 - DNA, 13 bp, Artificial Sequence
  synthetic sequence
agacgcccagatg

SEQ ID NO: 12773 - DNA, 13 bp, Artificial Sequence
  synthetic sequence
ctgtgagctattc

SEQ ID NO: 12774 - DNA, 13 bp, Artificial Sequence
  synthetic sequence
ccagacctagatg

SEQ ID NO: 12775 - DNA, 13 bp, Artificial Sequence
  synthetic sequence
tcatggatggaca

SEQ ID NO: 12776 - DNA, 13 bp, Artificial Sequence
  synthetic sequence
atgtgcagtttag

SEQ ID NO: 12777 - DNA, 13 bp, Artificial Sequence
  synthetic sequence
gtggtggcagcag

SEQ ID NO: 12778 - DNA, 13 bp, Artificial Sequence
  synthetic sequence
caatgagatctac

SEQ ID NO: 12779 - DNA, 13 bp, Artificial Sequence
  synthetic sequence
tgctcttccctca

SEQ ID NO: 12780 - DNA, 13 bp, Artificial Sequence
  synthetic sequence
tggagggctttgt

SEQ ID NO: 12781 - DNA, 13 bp, Artificial Sequence
  synthetic sequence
agaaatcaacagt

SEQ ID NO: 12782 - DNA, 13 bp, Artificial Sequence
  synthetic sequence
atgttgacttcat

SEQ ID NO: 12783 - DNA, 13 bp, Artificial Sequence
  synthetic sequence
tctcctttgggaa

SEQ ID NO: 12784 - DNA, 13 bp, Artificial Sequence
  synthetic sequence
ctcagccactctg

SEQ ID NO: 12785 - DNA, 13 bp, Artificial Sequence
  synthetic sequence
atggcagccatac

SEQ ID NO: 12786 - DNA, 13 bp, Artificial Sequence
  synthetic sequence
gagggctacatgg

SEQ ID NO: 12787 - DNA, 13 bp, Artificial Sequence
  synthetic sequence
accactaggagcc

SEQ ID NO: 12788 - DNA, 13 bp, Artificial Sequence
  synthetic sequence
acattccatgcca

SEQ ID NO: 12789 - DNA, 13 bp, Artificial Sequence
  synthetic sequence
gagtaccataggt

SEQ ID NO: 12790 - DNA, 13 bp, Artificial Sequence
  synthetic sequence
gacttgcggtgca

SEQ ID NO: 12791 - DNA, 13 bp, Artificial Sequence
  synthetic sequence
tcttgttcatggt

SEQ ID NO: 12792 - DNA, 13 bp, Artificial Sequence
  synthetic sequence
ggcatggaaggca

SEQ ID NO: 12793 - DNA, 13 bp, Artificial Sequence
  synthetic sequence
cagagttcaaaag

SEQ ID NO: 12794 - DNA, 13 bp, Artificial Sequence
  synthetic sequence
tgtttgagcctaa

SEQ ID NO: 12795 - DNA, 13 bp, Artificial Sequence
  synthetic sequence
cctcattctctct

SEQ ID NO: 12796 - DNA, 13 bp, Artificial Sequence
  synthetic sequence
acttttcagatgt

SEQ ID NO: 12797 - DNA, 13 bp, Artificial Sequence
  synthetic sequence
catcagaggtcat

SEQ ID NO: 12798 - DNA, 13 bp, Artificial Sequence
  synthetic sequence
caaagataaccta

SEQ ID NO: 12799 - DNA, 13 bp, Artificial Sequence
  synthetic sequence
tgaacttcttccc

SEQ ID NO: 12800 - DNA, 13 bp, Artificial Sequence
  synthetic sequence
gatagatggagat

SEQ ID NO: 12801 - DNA, 13 bp, Artificial Sequence
  synthetic sequence
tctgatgggatga

SEQ ID NO: 12802 - DNA, 13 bp, Artificial Sequence
  synthetic sequence
atagatgagaatc

SEQ ID NO: 12803 - DNA, 13 bp, Artificial Sequence
  synthetic sequence
tatcagacccaga

SEQ ID NO: 12804 - DNA, 13 bp, Artificial Sequence
  synthetic sequence
aggtgtgtctgtg

SEQ ID NO: 12805 - DNA, 13 bp, Artificial Sequence
  synthetic sequence
ctgatcagttctg

SEQ ID NO: 12806 - DNA, 13 bp, Artificial Sequence
  synthetic sequence
gctgcttgctcat

SEQ ID NO: 12807 - DNA, 13 bp, Artificial Sequence
  synthetic sequence
gtgagttcatcat

SEQ ID NO: 12808 - DNA, 13 bp, Artificial Sequence
  synthetic sequence
gttcagagctcag

SEQ ID NO: 12809 - DNA, 13 bp, Artificial Sequence
  synthetic sequence
ccctggctaccaa

SEQ ID NO: 12810 - DNA, 13 bp, Artificial Sequence
  synthetic sequence
ggttcatgccagc

SEQ ID NO: 12811 - DNA, 13 bp, Artificial Sequence
  synthetic sequence
tagagaaccatgg

SEQ ID NO: 12812 - DNA, 13 bp, Artificial Sequence
  synthetic sequence
attgggaccaaga

SEQ ID NO: 12813 - DNA, 13 bp, Artificial Sequence
  synthetic sequence
gtgatgaccttgg

SEQ ID NO: 12814 - DNA, 13 bp, Artificial Sequence
  synthetic sequence
actcatgccctca

SEQ ID NO: 12815 - DNA, 13 bp, Artificial Sequence
  synthetic sequence
ctcctggcaaatg

SEQ ID NO: 12816 - DNA, 13 bp, Artificial Sequence
  synthetic sequence
tgatcacaatcca

SEQ ID NO: 12817 - DNA, 13 bp, Artificial Sequence
  synthetic sequence
tccgcaaggctga

SEQ ID NO: 12818 - DNA, 13 bp, Artificial Sequence
  synthetic sequence
agcaagccccaga

SEQ ID NO: 12819 - DNA, 13 bp, Artificial Sequence
  synthetic sequence
agctgtgggcaaa

SEQ ID NO: 12820 - DNA, 13 bp, Artificial Sequence
  synthetic sequence
ctaagctacaggt

SEQ ID NO: 12821 - DNA, 13 bp, Artificial Sequence
  synthetic sequence
aaggaagagtggg

SEQ ID NO: 12822 - DNA, 13 bp, Artificial Sequence
  synthetic sequence
aatagatgtgagg

SEQ ID NO: 12823 - DNA, 13 bp, Artificial Sequence
  synthetic sequence
aaatctcagagac

SEQ ID NO: 12824 - DNA, 13 bp, Artificial Sequence
  synthetic sequence
gtccagtcaggat

SEQ ID NO: 12825 - DNA, 13 bp, Artificial Sequence
  synthetic sequence
ctcacagagatgg

SEQ ID NO: 12826 - DNA, 13 bp, Artificial Sequence
  synthetic sequence
aacctctctgtca

SEQ ID NO: 12827 - DNA, 13 bp, Artificial Sequence
  synthetic sequence
ggagaaatgtata

SEQ ID NO: 12828 - DNA, 13 bp, Artificial Sequence
  synthetic sequence
attcgaggtatgg

SEQ ID NO: 12829 - DNA, 13 bp, Artificial Sequence
  synthetic sequence
gccctaagtcaga

SEQ ID NO: 12830 - DNA, 13 bp, Artificial Sequence
  synthetic sequence
ctcagttctaaat

SEQ ID NO: 12831 - DNA, 13 bp, Artificial Sequence
  synthetic sequence
gggtcttctttgg

SEQ ID NO: 12832 - DNA, 13 bp, Artificial Sequence
  synthetic sequence
agaaggctagcct

SEQ ID NO: 12833 - DNA, 13 bp, Artificial Sequence
  synthetic sequence
agtctcataaaac

SEQ ID NO: 12834 - DNA, 13 bp, Artificial Sequence
  synthetic sequence
tcgtcaggagggg

SEQ ID NO: 12835 - DNA, 13 bp, Artificial Sequence
  synthetic sequence
ctacagaccttgg

SEQ ID NO: 12836 - DNA, 13 bp, Artificial Sequence
  synthetic sequence
tcagacatggatg

SEQ ID NO: 12837 - DNA, 13 bp, Artificial Sequence
  synthetic sequence
aaatctgagtcta

SEQ ID NO: 12838 - DNA, 13 bp, Artificial Sequence
  synthetic sequence
cctaacattcaac

SEQ ID NO: 12839 - DNA, 13 bp, Artificial Sequence
  synthetic sequence
gaagattgtggag

SEQ ID NO: 12840 - DNA, 13 bp, Artificial Sequence
  synthetic sequence
atacaagaaggaa

SEQ ID NO: 12841 - DNA, 13 bp, Artificial Sequence
  synthetic sequence
catcaaggactga

SEQ ID NO: 12842 - DNA, 13 bp, Artificial Sequence
  synthetic sequence
ggctagagatcaa

SEQ ID NO: 12843 - DNA, 13 bp, Artificial Sequence
  synthetic sequence
atgaggtcaaagc

SEQ ID NO: 12844 - DNA, 13 bp, Artificial Sequence
  synthetic sequence
cctcctcaggaag

SEQ ID NO: 12845 - DNA, 13 bp, Artificial Sequence
  synthetic sequence
tctcaccaaatct

SEQ ID NO: 12846 - DNA, 13 bp, Artificial Sequence
  synthetic sequence
cttagggcctcat

SEQ ID NO: 12847 - DNA, 13 bp, Artificial Sequence
  synthetic sequence
gctgggcaatgtg

SEQ ID NO: 12848 - DNA, 13 bp, Artificial Sequence
  synthetic sequence
acgtgacaaggag

SEQ ID NO: 12849 - DNA, 13 bp, Artificial Sequence
  synthetic sequence
agaggaacctaag

SEQ ID NO: 12850 - DNA, 13 bp, Artificial Sequence
  synthetic sequence
tccgaaggttatg

SEQ ID NO: 12851 - DNA, 13 bp, Artificial Sequence
  synthetic sequence
actctaggaggct

SEQ ID NO: 12852 - DNA, 13 bp, Artificial Sequence
  synthetic sequence
aatgataggaaga

SEQ ID NO: 12853 - DNA, 13 bp, Artificial Sequence
  synthetic sequence
ccatcaagtgagt

SEQ ID NO: 12854 - DNA, 13 bp, Artificial Sequence
  synthetic sequence
aactcagagagca

SEQ ID NO: 12855 - DNA, 13 bp, Artificial Sequence
  synthetic sequence
gtcctgagagaga

SEQ ID NO: 12856 - DNA, 13 bp, Artificial Sequence
  synthetic sequence
ctctagttctttg

SEQ ID NO: 12857 - DNA, 13 bp, Artificial Sequence
  synthetic sequence
tccagctctctga

SEQ ID NO: 12858 - DNA, 13 bp, Artificial Sequence
  synthetic sequence
tgttcaaattctg

SEQ ID NO: 12859 - DNA, 13 bp, Artificial Sequence
  synthetic sequence
ccccattacccat

SEQ ID NO: 12860 - DNA, 13 bp, Artificial Sequence
  synthetic sequence
tcttgatgaagag

SEQ ID NO: 12861 - DNA, 13 bp, Artificial Sequence
  synthetic sequence
ctaggtgtgtttg

SEQ ID NO: 12862 - DNA, 13 bp, Artificial Sequence
  synthetic sequence
tctcacggagctt

SEQ ID NO: 12863 - DNA, 13 bp, Artificial Sequence
  synthetic sequence
catgggctaaagt

SEQ ID NO: 12864 - DNA, 13 bp, Artificial Sequence
  synthetic sequence
gcagggctggtga

SEQ ID NO: 12865 - DNA, 13 bp, Artificial Sequence
  synthetic sequence
atagatgagaacc

SEQ ID NO: 12866 - DNA, 13 bp, Artificial Sequence
  synthetic sequence
tggggatgctgat

SEQ ID NO: 12867 - DNA, 13 bp, Artificial Sequence
  synthetic sequence
aaggaccatgact

SEQ ID NO: 12868 - DNA, 13 bp, Artificial Sequence
  synthetic sequence
tccaagagccagt

SEQ ID NO: 12869 - DNA, 13 bp, Artificial Sequence
  synthetic sequence
cagttctggatga

SEQ ID NO: 12870 - DNA, 13 bp, Artificial Sequence
  synthetic sequence
cacagaaggccag

SEQ ID NO: 12871 - DNA, 13 bp, Artificial Sequence
  synthetic sequence
ctcagagggatca

SEQ ID NO: 12872 - DNA, 13 bp, Artificial Sequence
  synthetic sequence
agagtggaaggaa

SEQ ID NO: 12873 - DNA, 13 bp, Artificial Sequence
  synthetic sequence
gcagcatatagga

SEQ ID NO: 12874 - DNA, 13 bp, Artificial Sequence
  synthetic sequence
gtcttgaatggcc

SEQ ID NO: 12875 - DNA, 13 bp, Artificial Sequence
  synthetic sequence
ggaggaacattcc

SEQ ID NO: 12876 - DNA, 13 bp, Artificial Sequence
  synthetic sequence
tctcttacctacc

SEQ ID NO: 12877 - DNA, 13 bp, Artificial Sequence
  synthetic sequence
cccaaagaggcaa

SEQ ID NO: 12878 - DNA, 13 bp, Artificial Sequence
  synthetic sequence
tgctggagaagat

SEQ ID NO: 12879 - DNA, 13 bp, Artificial Sequence
  synthetic sequence
gaagacatgcaag

SEQ ID NO: 12880 - DNA, 13 bp, Artificial Sequence
  synthetic sequence
ggttttagcctag

SEQ ID NO: 12881 - DNA, 13 bp, Artificial Sequence
  synthetic sequence
aatccagctctca

SEQ ID NO: 12882 - DNA, 13 bp, Artificial Sequence
  synthetic sequence
gctgatgaggtct

SEQ ID NO: 12883 - DNA, 13 bp, Artificial Sequence
  synthetic sequence
agatcttaaggaa

SEQ ID NO: 12884 - DNA, 13 bp, Artificial Sequence
  synthetic sequence
ttctctctccaga

SEQ ID NO: 12885 - DNA, 13 bp, Artificial Sequence
  synthetic sequence
tctgtcattgctt

SEQ ID NO: 12886 - DNA, 13 bp, Artificial Sequence
  synthetic sequence
cagatccagctgc

SEQ ID NO: 12887 - DNA, 13 bp, Artificial Sequence
  synthetic sequence
caaaccacacctc

SEQ ID NO: 12888 - DNA, 13 bp, Artificial Sequence
  synthetic sequence
gctcctctgcctc

SEQ ID NO: 12889 - DNA, 13 bp, Artificial Sequence
  synthetic sequence
tcttgcctgcttg

SEQ ID NO: 12890 - DNA, 13 bp, Artificial Sequence
  synthetic sequence
tctcctcagtctt

SEQ ID NO: 12891 - DNA, 13 bp, Artificial Sequence
  synthetic sequence
gcctcaagctctt

SEQ ID NO: 12892 - DNA, 13 bp, Artificial Sequence
  synthetic sequence
ccatcatcttttt

SEQ ID NO: 12893 - DNA, 13 bp, Artificial Sequence
  synthetic sequence
tccacttcttggc

SEQ ID NO: 12894 - DNA, 13 bp, Artificial Sequence
  synthetic sequence
ccaatgtaccagc

SEQ ID NO: 12895 - DNA, 13 bp, Artificial Sequence
  synthetic sequence
gtatgccctgcat

SEQ ID NO: 12896 - DNA, 13 bp, Artificial Sequence
  synthetic sequence
gattgggtcccta

SEQ ID NO: 12897 - DNA, 13 bp, Artificial Sequence
  synthetic sequence
cacacattgtgat

SEQ ID NO: 12898 - DNA, 13 bp, Artificial Sequence
  synthetic sequence
tccacagattgaa

SEQ ID NO: 12899 - DNA, 13 bp, Artificial Sequence
  synthetic sequence
gcatggcagatgc

SEQ ID NO: 12900 - DNA, 13 bp, Artificial Sequence
  synthetic sequence
cagaccacaagat

SEQ ID NO: 12901 - DNA, 13 bp, Artificial Sequence
  synthetic sequence
ttcatggcagaaa

SEQ ID NO: 12902 - DNA, 13 bp, Artificial Sequence
  synthetic sequence
ttaccctgtatct

SEQ ID NO: 12903 - DNA, 13 bp, Artificial Sequence
  synthetic sequence
catatgcgccatg

SEQ ID NO: 12904 - DNA, 13 bp, Artificial Sequence
  synthetic sequence
atcttttggggct

SEQ ID NO: 12905 - DNA, 13 bp, Artificial Sequence
  synthetic sequence
gggtctgtgctca

SEQ ID NO: 12906 - DNA, 13 bp, Artificial Sequence
  synthetic sequence
gaagcatgtagtg

SEQ ID NO: 12907 - DNA, 13 bp, Artificial Sequence
  synthetic sequence
tctcaatcaatgt

SEQ ID NO: 12908 - DNA, 13 bp, Artificial Sequence
  synthetic sequence
tcccattccccag

SEQ ID NO: 12909 - DNA, 13 bp, Artificial Sequence
  synthetic sequence
gctttaggtagtg

SEQ ID NO: 12910 - DNA, 13 bp, Artificial Sequence
  synthetic sequence
cacataatggtgc

SEQ ID NO: 12911 - DNA, 13 bp, Artificial Sequence
  synthetic sequence
accaagtgcctgt

SEQ ID NO: 12912 - DNA, 13 bp, Artificial Sequence
  synthetic sequence
actactgagcctg

SEQ ID NO: 12913 - DNA, 13 bp, Artificial Sequence
  synthetic sequence
atgttccccatag

SEQ ID NO: 12914 - DNA, 13 bp, Artificial Sequence
  synthetic sequence
cccatcctgttca

SEQ ID NO: 12915 - DNA, 13 bp, Artificial Sequence
  synthetic sequence
accttctctgcca

SEQ ID NO: 12916 - DNA, 13 bp, Artificial Sequence
  synthetic sequence
actccttggagag

SEQ ID NO: 12917 - DNA, 13 bp, Artificial Sequence
  synthetic sequence
ctctcatcttgac

SEQ ID NO: 12918 - DNA, 13 bp, Artificial Sequence
  synthetic sequence
ctgttgtctttga

SEQ ID NO: 12919 - DNA, 13 bp, Artificial Sequence
  synthetic sequence
acaaatttccctg

SEQ ID NO: 12920 - DNA, 13 bp, Artificial Sequence
  synthetic sequence
cttttgcagggtc

SEQ ID NO: 12921 - DNA, 13 bp, Artificial Sequence
  synthetic sequence
gcaacagtctcat

SEQ ID NO: 12922 - DNA, 13 bp, Artificial Sequence
  synthetic sequence
ctgggcttgtcct

SEQ ID NO: 12923 - DNA, 13 bp, Artificial Sequence
  synthetic sequence
caggagacccaaa

SEQ ID NO: 12924 - DNA, 13 bp, Artificial Sequence
  synthetic sequence
agtagagctccca

SEQ ID NO: 12925 - DNA, 13 bp, Artificial Sequence
  synthetic sequence
gctcttgagttgt

SEQ ID NO: 12926 - DNA, 13 bp, Artificial Sequence
  synthetic sequence
cagcccctatgtc

SEQ ID NO: 12927 - DNA, 13 bp, Artificial Sequence
  synthetic sequence
ccatgctgattct

SEQ ID NO: 12928 - DNA, 13 bp, Artificial Sequence
  synthetic sequence
gtttgcttgttgc

SEQ ID NO: 12929 - DNA, 13 bp, Artificial Sequence
  synthetic sequence
ctgactctgatat

SEQ ID NO: 12930 - DNA, 13 bp, Artificial Sequence
  synthetic sequence
ttggtcggcttga

SEQ ID NO: 12931 - DNA, 13 bp, Artificial Sequence
  synthetic sequence
tggtctagaatgg

SEQ ID NO: 12932 - DNA, 13 bp, Artificial Sequence
  synthetic sequence
ttgaatccactca

SEQ ID NO: 12933 - DNA, 13 bp, Artificial Sequence
  synthetic sequence
ggtatcacaagag

SEQ ID NO: 12934 - DNA, 13 bp, Artificial Sequence
  synthetic sequence
caacaaagaacct

SEQ ID NO: 12935 - DNA, 13 bp, Artificial Sequence
  synthetic sequence
aagctcttctcag

SEQ ID NO: 12936 - DNA, 13 bp, Artificial Sequence
  synthetic sequence
tgaaaattcaacc

SEQ ID NO: 12937 - DNA, 13 bp, Artificial Sequence
  synthetic sequence
tctaccctcccct

SEQ ID NO: 12938 - DNA, 13 bp, Artificial Sequence
  synthetic sequence
taaagcgaaagca

SEQ ID NO: 12939 - DNA, 13 bp, Artificial Sequence
  synthetic sequence
caacatccaagaa

SEQ ID NO: 12940 - DNA, 13 bp, Artificial Sequence
  synthetic sequence
atttgcaggaata

SEQ ID NO: 12941 - DNA, 13 bp, Artificial Sequence
  synthetic sequence
gcctgactgatct

SEQ ID NO: 12942 - DNA, 13 bp, Artificial Sequence
  synthetic sequence
ccccactgatgct

SEQ ID NO: 12943 - DNA, 13 bp, Artificial Sequence
  synthetic sequence
ccagcatctcgat

SEQ ID NO: 12944 - DNA, 13 bp, Artificial Sequence
  synthetic sequence
ttctgcttccatt

SEQ ID NO: 12945 - DNA, 13 bp, Artificial Sequence
  synthetic sequence
ttctgaattaggg

SEQ ID NO: 12946 - DNA, 13 bp, Artificial Sequence
  synthetic sequence
tcagagccttcta

SEQ ID NO: 12947 - DNA, 13 bp, Artificial Sequence
  synthetic sequence
ggggcacctagga

SEQ ID NO: 12948 - DNA, 13 bp, Artificial Sequence
  synthetic sequence
gggattaggctga

SEQ ID NO: 12949 - DNA, 13 bp, Artificial Sequence
  synthetic sequence
cctcaggaatttg

SEQ ID NO: 12950 - DNA, 13 bp, Artificial Sequence
  synthetic sequence
catccaatctggt

SEQ ID NO: 12951 - DNA, 13 bp, Artificial Sequence
  synthetic sequence
aggcctctatgat

SEQ ID NO: 12952 - DNA, 13 bp, Artificial Sequence
  synthetic sequence
agaacttgacaga

SEQ ID NO: 12953 - DNA, 13 bp, Artificial Sequence
  synthetic sequence
ctcaagtctttcc

SEQ ID NO: 12954 - DNA, 13 bp, Artificial Sequence
  synthetic sequence
ctctatatgcaga

SEQ ID NO: 12955 - DNA, 13 bp, Artificial Sequence
  synthetic sequence
acccacccctact

SEQ ID NO: 12956 - DNA, 13 bp, Artificial Sequence
  synthetic sequence
gcttgataatgac

SEQ ID NO: 12957 - DNA, 13 bp, Artificial Sequence
  synthetic sequence
ctctctgaggcca

SEQ ID NO: 12958 - DNA, 13 bp, Artificial Sequence
  synthetic sequence
aatctcctatgtc

SEQ ID NO: 12959 - DNA, 13 bp, Artificial Sequence
  synthetic sequence
gtctctcggcctg

SEQ ID NO: 12960 - DNA, 13 bp, Artificial Sequence
  synthetic sequence
gcgtgagagaagg

SEQ ID NO: 12961 - DNA, 13 bp, Artificial Sequence
  synthetic sequence
aacccagttgtga

SEQ ID NO: 12962 - DNA, 13 bp, Artificial Sequence
  synthetic sequence
agtctttggaaaa

SEQ ID NO: 12963 - DNA, 13 bp, Artificial Sequence
  synthetic sequence
atgtcctcctcca

SEQ ID NO: 12964 - DNA, 13 bp, Artificial Sequence
  synthetic sequence
gaccactgaacca

SEQ ID NO: 12965 - DNA, 13 bp, Artificial Sequence
  synthetic sequence
ccctcgattcaat

SEQ ID NO: 12966 - DNA, 13 bp, Artificial Sequence
  synthetic sequence
ggatgcttgaact

SEQ ID NO: 12967 - DNA, 13 bp, Artificial Sequence
  synthetic sequence
ccaatgtcttcaa

SEQ ID NO: 12968 - DNA, 13 bp, Artificial Sequence
  synthetic sequence
tgatggaattctt

SEQ ID NO: 12969 - DNA, 13 bp, Artificial Sequence
  synthetic sequence
gaaactcagggct

SEQ ID NO: 12970 - DNA, 13 bp, Artificial Sequence
  synthetic sequence
actaatgctttcc

SEQ ID NO: 12971 - DNA, 13 bp, Artificial Sequence
  synthetic sequence
tccctaacaacaa

SEQ ID NO: 12972 - DNA, 13 bp, Artificial Sequence
  synthetic sequence
acgtgaagtcatg

SEQ ID NO: 12973 - DNA, 13 bp, Artificial Sequence
  synthetic sequence
ttccctaatcctg

SEQ ID NO: 12974 - DNA, 13 bp, Artificial Sequence
  synthetic sequence
gcctgatctcctc

SEQ ID NO: 12975 - DNA, 13 bp, Artificial Sequence
  synthetic sequence
aaccccacatgat

SEQ ID NO: 12976 - DNA, 13 bp, Artificial Sequence
  synthetic sequence
ggctgtcacaaag

SEQ ID NO: 12977 - DNA, 13 bp, Artificial Sequence
  synthetic sequence
agttatactcgac

SEQ ID NO: 12978 - DNA, 13 bp, Artificial Sequence
  synthetic sequence
cccagtcttcagg

SEQ ID NO: 12979 - DNA, 13 bp, Artificial Sequence
  synthetic sequence
catcaatggtgtc

SEQ ID NO: 12980 - DNA, 13 bp, Artificial Sequence
  synthetic sequence
tcaatgtaccaca

SEQ ID NO: 12981 - DNA, 13 bp, Artificial Sequence
  synthetic sequence
aatatgaggaatg

SEQ ID NO: 12982 - DNA, 13 bp, Artificial Sequence
  synthetic sequence
gggatgtaagcat

SEQ ID NO: 12983 - DNA, 13 bp, Artificial Sequence
  synthetic sequence
gggcacttgaact

SEQ ID NO: 12984 - DNA, 13 bp, Artificial Sequence
  synthetic sequence
gcaatgtcaagtt

SEQ ID NO: 12985 - DNA, 13 bp, Artificial Sequence
  synthetic sequence
aaaggaccatccc

SEQ ID NO: 12986 - DNA, 13 bp, Artificial Sequence
  synthetic sequence
agctctgtagtcc

SEQ ID NO: 12987 - DNA, 13 bp, Artificial Sequence
  synthetic sequence
gtttccctagcat

SEQ ID NO: 12988 - DNA, 13 bp, Artificial Sequence
  synthetic sequence
aaatgttccccat

SEQ ID NO: 12989 - DNA, 13 bp, Artificial Sequence
  synthetic sequence
ccacacacctttt

SEQ ID NO: 12990 - DNA, 13 bp, Artificial Sequence
  synthetic sequence
gcctgagtcggtc

SEQ ID NO: 12991 - DNA, 13 bp, Artificial Sequence
  synthetic sequence
tgttccagcatct

SEQ ID NO: 12992 - DNA, 13 bp, Artificial Sequence
  synthetic sequence
caccaggtgaatg

SEQ ID NO: 12993 - DNA, 13 bp, Artificial Sequence
  synthetic sequence
ggcagcttggtcc

SEQ ID NO: 12994 - DNA, 13 bp, Artificial Sequence
  synthetic sequence
gcagaccataaga

SEQ ID NO: 12995 - DNA, 13 bp, Artificial Sequence
  synthetic sequence
ctgagcaatttct

SEQ ID NO: 12996 - DNA, 13 bp, Artificial Sequence
  synthetic sequence
aatctaaatcctg

SEQ ID NO: 12997 - DNA, 13 bp, Artificial Sequence
  synthetic sequence
atgtttgtttgtt

SEQ ID NO: 12998 - DNA, 13 bp, Artificial Sequence
  synthetic sequence
catgatatcaaca

SEQ ID NO: 12999 - DNA, 13 bp, Artificial Sequence
  synthetic sequence
gccttttccaaca

SEQ ID NO: 13000 - DNA, 13 bp, Artificial Sequence
  synthetic sequence
aatatcaagttct

SEQ ID NO: 13001 - DNA, 13 bp, Artificial Sequence
  synthetic sequence
cttctttctccga

SEQ ID NO: 13002 - DNA, 13 bp, Artificial Sequence
  synthetic sequence
tctgtatatatgg

SEQ ID NO: 13003 - DNA, 13 bp, Artificial Sequence
  synthetic sequence
acctcattgtccc

SEQ ID NO: 13004 - DNA, 13 bp, Artificial Sequence
  synthetic sequence
agaaagagcggtg

SEQ ID NO: 13005 - DNA, 13 bp, Artificial Sequence
  synthetic sequence
ggatgattcatct

SEQ ID NO: 13006 - DNA, 13 bp, Artificial Sequence
  synthetic sequence
cgtacaattgctt

SEQ ID NO: 13007 - DNA, 13 bp, Artificial Sequence
  synthetic sequence
cagggtatataat

SEQ ID NO: 13008 - DNA, 13 bp, Artificial Sequence
  synthetic sequence
gagaccaaactcg

SEQ ID NO: 13009 - DNA, 13 bp, Artificial Sequence
  synthetic sequence
gcagatattgcta

SEQ ID NO: 13010 - DNA, 13 bp, Artificial Sequence
  synthetic sequence
ctttaagtggggc

SEQ ID NO: 13011 - DNA, 13 bp, Artificial Sequence
  synthetic sequence
tttattaatcaaa

SEQ ID NO: 13012 - DNA, 13 bp, Artificial Sequence
  synthetic sequence
atgaccatttgaa

SEQ ID NO: 13013 - DNA, 13 bp, Artificial Sequence
  synthetic sequence
agagctgggtgca

SEQ ID NO: 13014 - DNA, 13 bp, Artificial Sequence
  synthetic sequence
aatagagcctatt

SEQ ID NO: 13015 - DNA, 13 bp, Artificial Sequence
  synthetic sequence
cacttccaccttg

SEQ ID NO: 13016 - DNA, 13 bp, Artificial Sequence
  synthetic sequence
taactgattgatc

SEQ ID NO: 13017 - DNA, 13 bp, Artificial Sequence
  synthetic sequence
aagacgtactcag

SEQ ID NO: 13018 - DNA, 13 bp, Artificial Sequence
  synthetic sequence
accgattattctt

SEQ ID NO: 13019 - DNA, 13 bp, Artificial Sequence
  synthetic sequence
atgccgcattagc

SEQ ID NO: 13020 - DNA, 13 bp, Artificial Sequence
  synthetic sequence
agtcatcattgag

SEQ ID NO: 13021 - DNA, 13 bp, Artificial Sequence
  synthetic sequence
ggctttagttttt

SEQ ID NO: 13022 - DNA, 13 bp, Artificial Sequence
  synthetic sequence
agttttgccctac

SEQ ID NO: 13023 - DNA, 13 bp, Artificial Sequence
  synthetic sequence
gctattctccagg

SEQ ID NO: 13024 - DNA, 13 bp, Artificial Sequence
  synthetic sequence
agtcatatgtatg

SEQ ID NO: 13025 - DNA, 13 bp, Artificial Sequence
  synthetic sequence
acttccatcttgg

SEQ ID NO: 13026 - DNA, 13 bp, Artificial Sequence
  synthetic sequence
tcattaatcaggg

SEQ ID NO: 13027 - DNA, 13 bp, Artificial Sequence
  synthetic sequence
atctgcattttat

SEQ ID NO: 13028 - DNA, 13 bp, Artificial Sequence
  synthetic sequence
aagaaccacttaa

SEQ ID NO: 13029 - DNA, 13 bp, Artificial Sequence
  synthetic sequence
tagtagactcctt

SEQ ID NO: 13030 - DNA, 13 bp, Artificial Sequence
  synthetic sequence
aacaaaagcacat

SEQ ID NO: 13031 - DNA, 13 bp, Artificial Sequence
  synthetic sequence
caacaactcgtga

SEQ ID NO: 13032 - DNA, 13 bp, Artificial Sequence
  synthetic sequence
gctgatcttattg

SEQ ID NO: 13033 - DNA, 13 bp, Artificial Sequence
  synthetic sequence
ctaaaggaaaagt

SEQ ID NO: 13034 - DNA, 13 bp, Artificial Sequence
  synthetic sequence
gatgaccatttga

SEQ ID NO: 13035 - DNA, 13 bp, Artificial Sequence
  synthetic sequence
ggtcagactgctg

SEQ ID NO: 13036 - DNA, 13 bp, Artificial Sequence
  synthetic sequence
caaacagctgatt

SEQ ID NO: 13037 - DNA, 13 bp, Artificial Sequence
  synthetic sequence
caatctacctcat

SEQ ID NO: 13038 - DNA, 13 bp, Artificial Sequence
  synthetic sequence
aatttcgttccgt

SEQ ID NO: 13039 - DNA, 13 bp, Artificial Sequence
  synthetic sequence
ccgttcaaactgg

SEQ ID NO: 13040 - DNA, 13 bp, Artificial Sequence
  synthetic sequence
tatcatctcttta

SEQ ID NO: 13041 - DNA, 13 bp, Artificial Sequence
  synthetic sequence
atatggggtttat

SEQ ID NO: 13042 - DNA, 13 bp, Artificial Sequence
  synthetic sequence
aagtcttgttagg

SEQ ID NO: 13043 - DNA, 13 bp, Artificial Sequence
  synthetic sequence
taaatgtagttaa

SEQ ID NO: 13044 - DNA, 13 bp, Artificial Sequence
  synthetic sequence
atatgatttatta

SEQ ID NO: 13045 - DNA, 13 bp, Artificial Sequence
  synthetic sequence
tgtcatttagtat

SEQ ID NO: 13046 - DNA, 13 bp, Artificial Sequence
  synthetic sequence
tttacttataatg

SEQ ID NO: 13047 - DNA, 13 bp, Artificial Sequence
  synthetic sequence
atacagatgtctt

SEQ ID NO: 13048 - DNA, 13 bp, Artificial Sequence
  synthetic sequence
caatccctgttgg

SEQ ID NO: 13049 - DNA, 13 bp, Artificial Sequence
  synthetic sequence
ccaatatagggat

SEQ ID NO: 13050 - DNA, 13 bp, Artificial Sequence
  synthetic sequence
tgttaacatcatc

SEQ ID NO: 13051 - DNA, 13 bp, Artificial Sequence
  synthetic sequence
atgcaaagaccca

SEQ ID NO: 13052 - DNA, 13 bp, Artificial Sequence
  synthetic sequence
ttaacggaacgaa

SEQ ID NO: 13053 - DNA, 13 bp, Artificial Sequence
  synthetic sequence
taccctggttata

SEQ ID NO: 13054 - DNA, 13 bp, Artificial Sequence
  synthetic sequence
tgacaggactgat

SEQ ID NO: 13055 - DNA, 13 bp, Artificial Sequence
  synthetic sequence
tcatgtataagat

SEQ ID NO: 13056 - DNA, 13 bp, Artificial Sequence
  synthetic sequence
gtttgacggcccc

SEQ ID NO: 13057 - DNA, 13 bp, Artificial Sequence
  synthetic sequence
tgccattatggtg

SEQ ID NO: 13058 - DNA, 13 bp, Artificial Sequence
  synthetic sequence
tttgactcatcaa

SEQ ID NO: 13059 - DNA, 13 bp, Artificial Sequence
  synthetic sequence
ggctcttctaagt

SEQ ID NO: 13060 - DNA, 13 bp, Artificial Sequence
  synthetic sequence
tattaattgactt

SEQ ID NO: 13061 - DNA, 13 bp, Artificial Sequence
  synthetic sequence
ggataaaacaaat

SEQ ID NO: 13062 - DNA, 13 bp, Artificial Sequence
  synthetic sequence
acgagagtctgag

SEQ ID NO: 13063 - DNA, 13 bp, Artificial Sequence
  synthetic sequence
cagccaggaagtc

SEQ ID NO: 13064 - DNA, 13 bp, Artificial Sequence
  synthetic sequence
tctttttgttcag

SEQ ID NO: 13065 - DNA, 13 bp, Artificial Sequence
  synthetic sequence
atatctacaaggg

SEQ ID NO: 13066 - DNA, 13 bp, Artificial Sequence
  synthetic sequence
taacatgtacaag

SEQ ID NO: 13067 - DNA, 13 bp, Artificial Sequence
  synthetic sequence
tggtggataacat

SEQ ID NO: 13068 - DNA, 13 bp, Artificial Sequence
  synthetic sequence
gtttggtctccaa

SEQ ID NO: 13069 - DNA, 13 bp, Artificial Sequence
  synthetic sequence
gttgtcttgcact

SEQ ID NO: 13070 - DNA, 13 bp, Artificial Sequence
  synthetic sequence
aatccctgttgga

SEQ ID NO: 13071 - DNA, 13 bp, Artificial Sequence
  synthetic sequence
ccaccgctctttc

SEQ ID NO: 13072 - DNA, 13 bp, Artificial Sequence
  synthetic sequence
taagtcaatggaa

SEQ ID NO: 13073 - DNA, 13 bp, Artificial Sequence
  synthetic sequence
ttaagaattatcg

SEQ ID NO: 13074 - DNA, 13 bp, Artificial Sequence
  synthetic sequence
agtcgatagaatt

SEQ ID NO: 13075 - DNA, 13 bp, Artificial Sequence
  synthetic sequence
taatcggtaatgc

SEQ ID NO: 13076 - DNA, 13 bp, Artificial Sequence
  synthetic sequence
acttataatgagg

SEQ ID NO: 13077 - DNA, 13 bp, Artificial Sequence
  synthetic sequence
tccaatataggga

SEQ ID NO: 13078 - DNA, 13 bp, Artificial Sequence
  synthetic sequence
acatatgacttaa

SEQ ID NO: 13079 - DNA, 13 bp, Artificial Sequence
  synthetic sequence
gactatataatga

SEQ ID NO: 13080 - DNA, 13 bp, Artificial Sequence
  synthetic sequence
attaattgactta

SEQ ID NO: 13081 - DNA, 13 bp, Artificial Sequence
  synthetic sequence
ttgtaatgaagaa

SEQ ID NO: 13082 - DNA, 13 bp, Artificial Sequence
  synthetic sequence
gaaaatcagttag

SEQ ID NO: 13083 - DNA, 13 bp, Artificial Sequence
  synthetic sequence
acagataacaata

SEQ ID NO: 13084 - DNA, 13 bp, Artificial Sequence
  synthetic sequence
aacaaatctatac

SEQ ID NO: 13085 - DNA, 13 bp, Artificial Sequence
  synthetic sequence
ggcggagatcaaa

SEQ ID NO: 13086 - DNA, 13 bp, Artificial Sequence
  synthetic sequence
ctaccagaaagaa

SEQ ID NO: 13087 - DNA, 13 bp, Artificial Sequence
  synthetic sequence
actgttaaatatt

SEQ ID NO: 13088 - DNA, 13 bp, Artificial Sequence
  synthetic sequence
caagtcgggcata

SEQ ID NO: 13089 - DNA, 13 bp, Artificial Sequence
  synthetic sequence
ttacaggaaattc

SEQ ID NO: 13090 - DNA, 13 bp, Artificial Sequence
  synthetic sequence
aatatactccaca

SEQ ID NO: 13091 - DNA, 13 bp, Artificial Sequence
  synthetic sequence
ctagcagataagc

SEQ ID NO: 13092 - DNA, 13 bp, Artificial Sequence
  synthetic sequence
agtttctatgtag

SEQ ID NO: 13093 - DNA, 13 bp, Artificial Sequence
  synthetic sequence
tcatactgctcag

SEQ ID NO: 13094 - DNA, 13 bp, Artificial Sequence
  synthetic sequence
ataccccactaag

SEQ ID NO: 13095 - DNA, 13 bp, Artificial Sequence
  synthetic sequence
aacagtattgttg

SEQ ID NO: 13096 - DNA, 13 bp, Artificial Sequence
  synthetic sequence
gaagcattaaaca

SEQ ID NO: 13097 - DNA, 13 bp, Artificial Sequence
  synthetic sequence
tggctaggcctgc

SEQ ID NO: 13098 - DNA, 13 bp, Artificial Sequence
  synthetic sequence
cctaattttgctg

SEQ ID NO: 13099 - DNA, 13 bp, Artificial Sequence
  synthetic sequence
attaaaaagactt

SEQ ID NO: 13100 - DNA, 13 bp, Artificial Sequence
  synthetic sequence
gtcctgatcctac

SEQ ID NO: 13101 - DNA, 13 bp, Artificial Sequence
  synthetic sequence
actgttgttattt

SEQ ID NO: 13102 - DNA, 13 bp, Artificial Sequence
  synthetic sequence
caaattttactac

SEQ ID NO: 13103 - DNA, 13 bp, Artificial Sequence
  synthetic sequence
ctattgttagaca

SEQ ID NO: 13104 - DNA, 13 bp, Artificial Sequence
  synthetic sequence
atctatgaaacca

SEQ ID NO: 13105 - DNA, 13 bp, Artificial Sequence
  synthetic sequence
gacgctgtcaaca

SEQ ID NO: 13106 - DNA, 13 bp, Artificial Sequence
  synthetic sequence
caaaaaccttttg

SEQ ID NO: 13107 - DNA, 13 bp, Artificial Sequence
  synthetic sequence
tccagatgtatat

SEQ ID NO: 13108 - DNA, 13 bp, Artificial Sequence
  synthetic sequence
caatgcacaaagc

SEQ ID NO: 13109 - DNA, 13 bp, Artificial Sequence
  synthetic sequence
gcagcattcactt

SEQ ID NO: 13110 - DNA, 13 bp, Artificial Sequence
  synthetic sequence
caagagaaaatct

SEQ ID NO: 13111 - DNA, 13 bp, Artificial Sequence
  synthetic sequence
agcaggatatgta

SEQ ID NO: 13112 - DNA, 13 bp, Artificial Sequence
  synthetic sequence
tatataaaaggat

SEQ ID NO: 13113 - DNA, 13 bp, Artificial Sequence
  synthetic sequence
gagaatggtatta

SEQ ID NO: 13114 - DNA, 13 bp, Artificial Sequence
  synthetic sequence
agtggaagcagaa

SEQ ID NO: 13115 - DNA, 13 bp, Artificial Sequence
  synthetic sequence
tgtatgttgatga

SEQ ID NO: 13116 - DNA, 13 bp, Artificial Sequence
  synthetic sequence
gtaaggtggaaag

SEQ ID NO: 13117 - DNA, 13 bp, Artificial Sequence
  synthetic sequence
gtcagacagacaa

SEQ ID NO: 13118 - DNA, 13 bp, Artificial Sequence
  synthetic sequence
gtatacaaattgt

SEQ ID NO: 13119 - DNA, 13 bp, Artificial Sequence
  synthetic sequence
gtcattggtggtg

SEQ ID NO: 13120 - DNA, 13 bp, Artificial Sequence
  synthetic sequence
tttttaaaagagt

SEQ ID NO: 13121 - DNA, 13 bp, Artificial Sequence
  synthetic sequence
tttttggtattac

SEQ ID NO: 13122 - DNA, 13 bp, Artificial Sequence
  synthetic sequence
taatgaaattgga

SEQ ID NO: 13123 - DNA, 13 bp, Artificial Sequence
  synthetic sequence
gtttttaattgtt

SEQ ID NO: 13124 - DNA, 13 bp, Artificial Sequence
  synthetic sequence
atgtatacctctt

SEQ ID NO: 13125 - DNA, 13 bp, Artificial Sequence
  synthetic sequence
tatgccaacgagg

SEQ ID NO: 13126 - DNA, 13 bp, Artificial Sequence
  synthetic sequence
atatatttgcctt

SEQ ID NO: 13127 - DNA, 13 bp, Artificial Sequence
  synthetic sequence
attgcaatactag

SEQ ID NO: 13128 - DNA, 13 bp, Artificial Sequence
  synthetic sequence
tatttttaaagct

SEQ ID NO: 13129 - DNA, 13 bp, Artificial Sequence
  synthetic sequence
accaaataagagt

SEQ ID NO: 13130 - DNA, 13 bp, Artificial Sequence
  synthetic sequence
attgctttaagtc

SEQ ID NO: 13131 - DNA, 13 bp, Artificial Sequence
  synthetic sequence
ttaccagtctctg

SEQ ID NO: 13132 - DNA, 13 bp, Artificial Sequence
  synthetic sequence
taatatttcttgt

SEQ ID NO: 13133 - DNA, 13 bp, Artificial Sequence
  synthetic sequence
acaaacccattag

SEQ ID NO: 13134 - DNA, 13 bp, Artificial Sequence
  synthetic sequence
ttaactttaaagg

SEQ ID NO: 13135 - DNA, 13 bp, Artificial Sequence
  synthetic sequence
tctgctttggaaa

SEQ ID NO: 13136 - DNA, 13 bp, Artificial Sequence
  synthetic sequence
cttgtttcaataa

SEQ ID NO: 13137 - DNA, 13 bp, Artificial Sequence
  synthetic sequence
tgaagtggttgct

SEQ ID NO: 13138 - DNA, 13 bp, Artificial Sequence
  synthetic sequence
tttactttgccat

SEQ ID NO: 13139 - DNA, 13 bp, Artificial Sequence
  synthetic sequence
gaggggtggatgg

SEQ ID NO: 13140 - DNA, 13 bp, Artificial Sequence
  synthetic sequence
ccctgtgaaggtg

SEQ ID NO: 13141 - DNA, 13 bp, Artificial Sequence
  synthetic sequence
gaatagttttatt

SEQ ID NO: 13142 - DNA, 13 bp, Artificial Sequence
  synthetic sequence
tgtgggtcttcct

SEQ ID NO: 13143 - DNA, 13 bp, Artificial Sequence
  synthetic sequence
tcagtatgaatac

SEQ ID NO: 13144 - DNA, 13 bp, Artificial Sequence
  synthetic sequence
aggtttgtatgtg

SEQ ID NO: 13145 - DNA, 13 bp, Artificial Sequence
  synthetic sequence
agattctggtgta

SEQ ID NO: 13146 - DNA, 13 bp, Artificial Sequence
  synthetic sequence
tggaagcatttgt

SEQ ID NO: 13147 - DNA, 13 bp, Artificial Sequence
  synthetic sequence
taaatcctaaaaa

SEQ ID NO: 13148 - DNA, 13 bp, Artificial Sequence
  synthetic sequence
ttaggatcatcat

SEQ ID NO: 13149 - DNA, 13 bp, Artificial Sequence
  synthetic sequence
ttgagaaggatgt

SEQ ID NO: 13150 - DNA, 13 bp, Artificial Sequence
  synthetic sequence
ttgagggcgagga

SEQ ID NO: 13151 - DNA, 13 bp, Artificial Sequence
  synthetic sequence
ctggactatttaa

SEQ ID NO: 13152 - DNA, 13 bp, Artificial Sequence
  synthetic sequence
ccttttggaaaaa

SEQ ID NO: 13153 - DNA, 13 bp, Artificial Sequence
  synthetic sequence
tctgtgacattgg

SEQ ID NO: 13154 - DNA, 13 bp, Artificial Sequence
  synthetic sequence
tgtggattgaaga

SEQ ID NO: 13155 - DNA, 13 bp, Artificial Sequence
  synthetic sequence
cagcggagaacag

SEQ ID NO: 13156 - DNA, 13 bp, Artificial Sequence
  synthetic sequence
agaagaaaatggg

SEQ ID NO: 13157 - DNA, 13 bp, Artificial Sequence
  synthetic sequence
tgagaccagggcc

SEQ ID NO: 13158 - DNA, 13 bp, Artificial Sequence
  synthetic sequence
gaggagggtggag

SEQ ID NO: 13159 - DNA, 13 bp, Artificial Sequence
  synthetic sequence
tttggtcaacaaa

SEQ ID NO: 13160 - DNA, 13 bp, Artificial Sequence
  synthetic sequence
aataccaacaaac

SEQ ID NO: 13161 - DNA, 13 bp, Artificial Sequence
  synthetic sequence
tgtactgggttag

SEQ ID NO: 13162 - DNA, 13 bp, Artificial Sequence
  synthetic sequence
ataagatgcatgg

SEQ ID NO: 13163 - DNA, 13 bp, Artificial Sequence
  synthetic sequence
tacaacatgatgg

SEQ ID NO: 13164 - DNA, 13 bp, Artificial Sequence
  synthetic sequence
gactggctgtggg

SEQ ID NO: 13165 - DNA, 13 bp, Artificial Sequence
  synthetic sequence
gctatggatggaa

SEQ ID NO: 13166 - DNA, 13 bp, Artificial Sequence
  synthetic sequence
gctcgatggtgaa

SEQ ID NO: 13167 - DNA, 13 bp, Artificial Sequence
  synthetic sequence
taggaaagagaga

SEQ ID NO: 13168 - DNA, 13 bp, Artificial Sequence
  synthetic sequence
aagaaatctccca

SEQ ID NO: 13169 - DNA, 13 bp, Artificial Sequence
  synthetic sequence
tctggaagtcaag

SEQ ID NO: 13170 - DNA, 13 bp, Artificial Sequence
  synthetic sequence
ctacaagaatgtg

SEQ ID NO: 13171 - DNA, 13 bp, Artificial Sequence
  synthetic sequence
ggaagaatggacc

SEQ ID NO: 13172 - DNA, 13 bp, Artificial Sequence
  synthetic sequence
tgggcactgtatg

SEQ ID NO: 13173 - DNA, 13 bp, Artificial Sequence
  synthetic sequence
ccagtcaactggg

SEQ ID NO: 13174 - DNA, 13 bp, Artificial Sequence
  synthetic sequence
gagcaggatggaa

SEQ ID NO: 13175 - DNA, 13 bp, Artificial Sequence
  synthetic sequence
caaatgaccctgc

SEQ ID NO: 13176 - DNA, 13 bp, Artificial Sequence
  synthetic sequence
cagcccttgtgac

SEQ ID NO: 13177 - DNA, 13 bp, Artificial Sequence
  synthetic sequence
acttcaatgaact

SEQ ID NO: 13178 - DNA, 13 bp, Artificial Sequence
  synthetic sequence
aggagagaagggc

SEQ ID NO: 13179 - DNA, 13 bp, Artificial Sequence
  synthetic sequence
tgggagccatgtt

SEQ ID NO: 13180 - DNA, 13 bp, Artificial Sequence
  synthetic sequence
aggaagatgtgaa

SEQ ID NO: 13181 - DNA, 13 bp, Artificial Sequence
  synthetic sequence
ttttcactaacag

SEQ ID NO: 13182 - DNA, 13 bp, Artificial Sequence
  synthetic sequence
ctgagttctgcat

SEQ ID NO: 13183 - DNA, 13 bp, Artificial Sequence
  synthetic sequence
acagatttgccac

SEQ ID NO: 13184 - DNA, 13 bp, Artificial Sequence
  synthetic sequence
ggtacatgtggct

SEQ ID NO: 13185 - DNA, 13 bp, Artificial Sequence
  synthetic sequence
acatgtggttggg

SEQ ID NO: 13186 - DNA, 13 bp, Artificial Sequence
  synthetic sequence
acatgtcaaaaat

SEQ ID NO: 13187 - DNA, 13 bp, Artificial Sequence
  synthetic sequence
acattgccaaatt

SEQ ID NO: 13188 - DNA, 13 bp, Artificial Sequence
  synthetic sequence
tcacaggtggcca

SEQ ID NO: 13189 - DNA, 13 bp, Artificial Sequence
  synthetic sequence
gagtgggccacga

SEQ ID NO: 13190 - DNA, 13 bp, Artificial Sequence
  synthetic sequence
gtttgaagaacag

SEQ ID NO: 13191 - DNA, 13 bp, Artificial Sequence
  synthetic sequence
taatgctgaagga

SEQ ID NO: 13192 - DNA, 13 bp, Artificial Sequence
  synthetic sequence
tggggtcagcagc

SEQ ID NO: 13193 - DNA, 13 bp, Artificial Sequence
  synthetic sequence
catacacgcccaa

SEQ ID NO: 13194 - DNA, 13 bp, Artificial Sequence
  synthetic sequence
acatgcccaaaat

SEQ ID NO: 13195 - DNA, 13 bp, Artificial Sequence
  synthetic sequence
aacagccatcgca

SEQ ID NO: 13196 - DNA, 13 bp, Artificial Sequence
  synthetic sequence
tagggtgttggaa

SEQ ID NO: 13197 - DNA, 13 bp, Artificial Sequence
  synthetic sequence
ctggagagaacca

SEQ ID NO: 13198 - DNA, 13 bp, Artificial Sequence
  synthetic sequence
gtgaaagagacag

SEQ ID NO: 13199 - DNA, 13 bp, Artificial Sequence
  synthetic sequence
tcagaatgatggc

SEQ ID NO: 13200 - DNA, 13 bp, Artificial Sequence
  synthetic sequence
gacagtctacaag

SEQ ID NO: 13201 - DNA, 13 bp, Artificial Sequence
  synthetic sequence
cgacacatgagat

SEQ ID NO: 13202 - DNA, 13 bp, Artificial Sequence
  synthetic sequence
tggtgaatggagt

SEQ ID NO: 13203 - DNA, 13 bp, Artificial Sequence
  synthetic sequence
caatatgatggga

SEQ ID NO: 13204 - DNA, 13 bp, Artificial Sequence
  synthetic sequence
tggccaaagcggt

SEQ ID NO: 13205 - DNA, 13 bp, Artificial Sequence
  synthetic sequence
gttgtgggacttt

SEQ ID NO: 13206 - DNA, 13 bp, Artificial Sequence
  synthetic sequence
atgcagagctacg

SEQ ID NO: 13207 - DNA, 13 bp, Artificial Sequence
  synthetic sequence
tcaaaccagccac

SEQ ID NO: 13208 - DNA, 13 bp, Artificial Sequence
  synthetic sequence
gagaagacatatg

SEQ ID NO: 13209 - DNA, 13 bp, Artificial Sequence
  synthetic sequence
tatgaggaggacg

SEQ ID NO: 13210 - DNA, 13 bp, Artificial Sequence
  synthetic sequence
gacgggaagacct

SEQ ID NO: 13211 - DNA, 13 bp, Artificial Sequence
  synthetic sequence
ctgctggaatcat

SEQ ID NO: 13212 - DNA, 13 bp, Artificial Sequence
  synthetic sequence
cactccttttggg

SEQ ID NO: 13213 - DNA, 13 bp, Artificial Sequence
  synthetic sequence
ccaagtccgacat

SEQ ID NO: 13214 - DNA, 13 bp, Artificial Sequence
  synthetic sequence
agccggtgtgttg

SEQ ID NO: 13215 - DNA, 13 bp, Artificial Sequence
  synthetic sequence
atgtcaataacct

SEQ ID NO: 13216 - DNA, 13 bp, Artificial Sequence
  synthetic sequence
acgccaatgacag

SEQ ID NO: 13217 - DNA, 13 bp, Artificial Sequence
  synthetic sequence
aggatggagctac

SEQ ID NO: 13218 - DNA, 13 bp, Artificial Sequence
  synthetic sequence
tcagctgctcttg

SEQ ID NO: 13219 - DNA, 13 bp, Artificial Sequence
  synthetic sequence
ctctaaatacttt

SEQ ID NO: 13220 - DNA, 13 bp, Artificial Sequence
  synthetic sequence
acggctgaaagag

SEQ ID NO: 13221 - DNA, 13 bp, Artificial Sequence
  synthetic sequence
ggaaaagggctcc

SEQ ID NO: 13222 - DNA, 13 bp, Artificial Sequence
  synthetic sequence
gaattcatggcat

SEQ ID NO: 13223 - DNA, 13 bp, Artificial Sequence
  synthetic sequence
cagtggagtggtt

SEQ ID NO: 13224 - DNA, 13 bp, Artificial Sequence
  synthetic sequence
agggtggaacatc

SEQ ID NO: 13225 - DNA, 13 bp, Artificial Sequence
  synthetic sequence
tcgagctgagttc

SEQ ID NO: 13226 - DNA, 13 bp, Artificial Sequence
  synthetic sequence
acaaagagaatgg

SEQ ID NO: 13227 - DNA, 13 bp, Artificial Sequence
  synthetic sequence
ctggtgtactgct

SEQ ID NO: 13228 - DNA, 13 bp, Artificial Sequence
  synthetic sequence
tctggtgtggaag

SEQ ID NO: 13229 - DNA, 13 bp, Artificial Sequence
  synthetic sequence
ggatacatcctgc

SEQ ID NO: 13230 - DNA, 13 bp, Artificial Sequence
  synthetic sequence
tcaggatgatggc

SEQ ID NO: 13231 - DNA, 13 bp, Artificial Sequence
  synthetic sequence
aacgaggcaaaga

SEQ ID NO: 13232 - DNA, 13 bp, Artificial Sequence
  synthetic sequence
gctagggtgctgg

SEQ ID NO: 13233 - DNA, 13 bp, Artificial Sequence
  synthetic sequence
tgcggatctgcat

SEQ ID NO: 13234 - DNA, 13 bp, Artificial Sequence
  synthetic sequence
cactcactgccat

SEQ ID NO: 13235 - DNA, 13 bp, Artificial Sequence
  synthetic sequence
tcccatggttttg

SEQ ID NO: 13236 - DNA, 13 bp, Artificial Sequence
  synthetic sequence
atcctttcacttc

SEQ ID NO: 13237 - DNA, 13 bp, Artificial Sequence
  synthetic sequence
acatctttcctcc

SEQ ID NO: 13238 - DNA, 13 bp, Artificial Sequence
  synthetic sequence
gtgtcatgaccat

SEQ ID NO: 13239 - DNA, 13 bp, Artificial Sequence
  synthetic sequence
tgcagtttttcca

SEQ ID NO: 13240 - DNA, 13 bp, Artificial Sequence
  synthetic sequence
ggtcatacgtcca

SEQ ID NO: 13241 - DNA, 13 bp, Artificial Sequence
  synthetic sequence
gaaggtttccatt

SEQ ID NO: 13242 - DNA, 13 bp, Artificial Sequence
  synthetic sequence
gtatggaatgtcg

SEQ ID NO: 13243 - DNA, 13 bp, Artificial Sequence
  synthetic sequence
cctgccagcctgg

SEQ ID NO: 13244 - DNA, 13 bp, Artificial Sequence
  synthetic sequence
cacagtgtcagct

SEQ ID NO: 13245 - DNA, 13 bp, Artificial Sequence
  synthetic sequence
tcatcaaccattt

SEQ ID NO: 13246 - DNA, 13 bp, Artificial Sequence
  synthetic sequence
ggtctggcttctc

SEQ ID NO: 13247 - DNA, 13 bp, Artificial Sequence
  synthetic sequence
ttcccaaattctc

SEQ ID NO: 13248 - DNA, 13 bp, Artificial Sequence
  synthetic sequence
tcatgaggttgca

SEQ ID NO: 13249 - DNA, 13 bp, Artificial Sequence
  synthetic sequence
tttggtcttctct

SEQ ID NO: 13250 - DNA, 13 bp, Artificial Sequence
  synthetic sequence
tggctgttcacct

SEQ ID NO: 13251 - DNA, 13 bp, Artificial Sequence
  synthetic sequence
tgaattgaccatg

SEQ ID NO: 13252 - DNA, 13 bp, Artificial Sequence
  synthetic sequence
ccatgggtttgac

SEQ ID NO: 13253 - DNA, 13 bp, Artificial Sequence
  synthetic sequence
accacatctgagc

SEQ ID NO: 13254 - DNA, 13 bp, Artificial Sequence
  synthetic sequence
aatggcatcccat

SEQ ID NO: 13255 - DNA, 13 bp, Artificial Sequence
  synthetic sequence
tgtatgatgtttc

SEQ ID NO: 13256 - DNA, 13 bp, Artificial Sequence
  synthetic sequence
tggcaccacgatg

SEQ ID NO: 13257 - DNA, 13 bp, Artificial Sequence
  synthetic sequence
agagtggctcctt

SEQ ID NO: 13258 - DNA, 13 bp, Artificial Sequence
  synthetic sequence
cctctgcaagctt

SEQ ID NO: 13259 - DNA, 13 bp, Artificial Sequence
  synthetic sequence
aattctttgatcg

SEQ ID NO: 13260 - DNA, 13 bp, Artificial Sequence
  synthetic sequence
tcaactcctccat

SEQ ID NO: 13261 - DNA, 13 bp, Artificial Sequence
  synthetic sequence
ccaacactcttgc

SEQ ID NO: 13262 - DNA, 13 bp, Artificial Sequence
  synthetic sequence
atgtcatcctcat

SEQ ID NO: 13263 - DNA, 13 bp, Artificial Sequence
  synthetic sequence
ggtggttcgggag

SEQ ID NO: 13264 - DNA, 13 bp, Artificial Sequence
  synthetic sequence
ggggctctgtcta

SEQ ID NO: 13265 - DNA, 13 bp, Artificial Sequence
  synthetic sequence
tgacaggtctggt

SEQ ID NO: 13266 - DNA, 13 bp, Artificial Sequence
  synthetic sequence
ggtgataggtctg

SEQ ID NO: 13267 - DNA, 13 bp, Artificial Sequence
  synthetic sequence
gcttttgtgtcaa

SEQ ID NO: 13268 - DNA, 13 bp, Artificial Sequence
  synthetic sequence
tccgtctttcctg

SEQ ID NO: 13269 - DNA, 13 bp, Artificial Sequence
  synthetic sequence
tcgcggctcatcc

SEQ ID NO: 13270 - DNA, 13 bp, Artificial Sequence
  synthetic sequence
cactcttgctgtc

SEQ ID NO: 13271 - DNA, 13 bp, Artificial Sequence
  synthetic sequence
tcatcctcatcta

SEQ ID NO: 13272 - DNA, 13 bp, Artificial Sequence
  synthetic sequence
gaacagatccctg

SEQ ID NO: 13273 - DNA, 13 bp, Artificial Sequence
  synthetic sequence
gagtggctccctt

SEQ ID NO: 13274 - DNA, 13 bp, Artificial Sequence
  synthetic sequence
aattcttctgggg

SEQ ID NO: 13275 - DNA, 13 bp, Artificial Sequence
  synthetic sequence
gtgaccacctgtc

SEQ ID NO: 13276 - DNA, 13 bp, Artificial Sequence
  synthetic sequence
tcatccactcacc

SEQ ID NO: 13277 - DNA, 13 bp, Artificial Sequence
  synthetic sequence
cctccgcaagctt

SEQ ID NO: 13278 - DNA, 13 bp, Artificial Sequence
  synthetic sequence
catgagcaaccac

SEQ ID NO: 13279 - DNA, 13 bp, Artificial Sequence
  synthetic sequence
ccaaccgctgttg

SEQ ID NO: 13280 - DNA, 13 bp, Artificial Sequence
  synthetic sequence
cctgcatggtacc

SEQ ID NO: 13281 - DNA, 13 bp, Artificial Sequence
  synthetic sequence
tgagcacttggct

SEQ ID NO: 13282 - DNA, 13 bp, Artificial Sequence
  synthetic sequence
tgaatggcattcc

SEQ ID NO: 13283 - DNA, 13 bp, Artificial Sequence
  synthetic sequence
cccaaaactttgg

SEQ ID NO: 13284 - DNA, 13 bp, Artificial Sequence
  synthetic sequence
cgttctgtatggg

SEQ ID NO: 13285 - DNA, 13 bp, Artificial Sequence
  synthetic sequence
tccgagtctcact

SEQ ID NO: 13286 - DNA, 13 bp, Artificial Sequence
  synthetic sequence
ggcggtaggtcaa

SEQ ID NO: 13287 - DNA, 13 bp, Artificial Sequence
  synthetic sequence
gttttgtctttca

SEQ ID NO: 13288 - DNA, 13 bp, Artificial Sequence
  synthetic sequence
tcctgaatgtcct

SEQ ID NO: 13289 - DNA, 13 bp, Artificial Sequence
  synthetic sequence
ggctctgcttcct

SEQ ID NO: 13290 - DNA, 13 bp, Artificial Sequence
  synthetic sequence
ctccatacttccg

SEQ ID NO: 13291 - DNA, 13 bp, Artificial Sequence
  synthetic sequence
tgcggatctgtat

SEQ ID NO: 13292 - DNA, 13 bp, Artificial Sequence
  synthetic sequence
tcctgcatggcac

SEQ ID NO: 13293 - DNA, 13 bp, Artificial Sequence
  synthetic sequence
tttctttagccac

SEQ ID NO: 13294 - DNA, 13 bp, Artificial Sequence
  synthetic sequence
cattccattggtc

SEQ ID NO: 13295 - DNA, 13 bp, Artificial Sequence
  synthetic sequence
tcataaccattgt

SEQ ID NO: 13296 - DNA, 13 bp, Artificial Sequence
  synthetic sequence
cttgccatccagg

SEQ ID NO: 13297 - DNA, 13 bp, Artificial Sequence
  synthetic sequence
ctgtgtcgtctgc

SEQ ID NO: 13298 - DNA, 13 bp, Artificial Sequence
  synthetic sequence
ttcctggacgaac

SEQ ID NO: 13299 - DNA, 13 bp, Artificial Sequence
  synthetic sequence
cgctctatctact

SEQ ID NO: 13300 - DNA, 13 bp, Artificial Sequence
  synthetic sequence
agctttccgacgg

SEQ ID NO: 13301 - DNA, 13 bp, Artificial Sequence
  synthetic sequence
tccgcccttggtg

SEQ ID NO: 13302 - DNA, 13 bp, Artificial Sequence
  synthetic sequence
ggtggctcctttt

SEQ ID NO: 13303 - DNA, 13 bp, Artificial Sequence
  synthetic sequence
cctgtcttcttct

SEQ ID NO: 13304 - DNA, 13 bp, Artificial Sequence
  synthetic sequence
gcaggttcagatg

SEQ ID NO: 13305 - DNA, 13 bp, Artificial Sequence
  synthetic sequence
ttcagttatccac

SEQ ID NO: 13306 - DNA, 13 bp, Artificial Sequence
  synthetic sequence
tgtccgttgccac

SEQ ID NO: 13307 - DNA, 13 bp, Artificial Sequence
  synthetic sequence
tttcagtgagctt

SEQ ID NO: 13308 - DNA, 13 bp, Artificial Sequence
  synthetic sequence
cttatggaacacg

SEQ ID NO: 13309 - DNA, 13 bp, Artificial Sequence
  synthetic sequence
ctccccatgagta

SEQ ID NO: 13310 - DNA, 13 bp, Artificial Sequence
  synthetic sequence
cctttcccatagg

SEQ ID NO: 13311 - DNA, 13 bp, Artificial Sequence
  synthetic sequence
gtgatgagatgtt

SEQ ID NO: 13312 - DNA, 13 bp, Artificial Sequence
  synthetic sequence
catgggttttaca

SEQ ID NO: 13313 - DNA, 13 bp, Artificial Sequence
  synthetic sequence
cacgcgagtactg

SEQ ID NO: 13314 - DNA, 13 bp, Artificial Sequence
  synthetic sequence
gtgataggagaac

SEQ ID NO: 13315 - DNA, 13 bp, Artificial Sequence
  synthetic sequence
actggttcaatga

SEQ ID NO: 13316 - DNA, 13 bp, Artificial Sequence
  synthetic sequence
tgataacaccaaa

SEQ ID NO: 13317 - DNA, 13 bp, Artificial Sequence
  synthetic sequence
gccactggacatg

SEQ ID NO: 13318 - DNA, 13 bp, Artificial Sequence
  synthetic sequence
catcagtggttcc

SEQ ID NO: 13319 - DNA, 13 bp, Artificial Sequence
  synthetic sequence
cggtgtgcaagag

SEQ ID NO: 13320 - DNA, 13 bp, Artificial Sequence
  synthetic sequence
gaggttggactag

SEQ ID NO: 13321 - DNA, 13 bp, Artificial Sequence
  synthetic sequence
ttgccgccaatga

SEQ ID NO: 13322 - DNA, 13 bp, Artificial Sequence
  synthetic sequence
accttggagatca

SEQ ID NO: 13323 - DNA, 13 bp, Artificial Sequence
  synthetic sequence
cagtggcgttgac

SEQ ID NO: 13324 - DNA, 13 bp, Artificial Sequence
  synthetic sequence
gacatgacacagt

SEQ ID NO: 13325 - DNA, 13 bp, Artificial Sequence
  synthetic sequence
cggccaaaacacg

SEQ ID NO: 13326 - DNA, 13 bp, Artificial Sequence
  synthetic sequence
gtggacatgacac

SEQ ID NO: 13327 - DNA, 13 bp, Artificial Sequence
  synthetic sequence
atgtgtccttgtt

SEQ ID NO: 13328 - DNA, 13 bp, Artificial Sequence
  synthetic sequence
ggaagacggcatc

SEQ ID NO: 13329 - DNA, 13 bp, Artificial Sequence
  synthetic sequence
cacctaaaaagcg

SEQ ID NO: 13330 - DNA, 13 bp, Artificial Sequence
  synthetic sequence
agagtggcacggt

SEQ ID NO: 13331 - DNA, 13 bp, Artificial Sequence
  synthetic sequence
atggacgtgtaca

SEQ ID NO: 13332 - DNA, 13 bp, Artificial Sequence
  synthetic sequence
gaggcaaagaaga

SEQ ID NO: 13333 - DNA, 13 bp, Artificial Sequence
  synthetic sequence
gggaactaagcca

SEQ ID NO: 13334 - DNA, 13 bp, Artificial Sequence
  synthetic sequence
caaaccccaccat

SEQ ID NO: 13335 - DNA, 13 bp, Artificial Sequence
  synthetic sequence
gatgtgtacaacc

SEQ ID NO: 13336 - DNA, 13 bp, Artificial Sequence
  synthetic sequence
aagcggaccccaa

SEQ ID NO: 13337 - DNA, 13 bp, Artificial Sequence
  synthetic sequence
tatcaggagaacc

SEQ ID NO: 13338 - DNA, 13 bp, Artificial Sequence
  synthetic sequence
ctctaccgtggaa

SEQ ID NO: 13339 - DNA, 13 bp, Artificial Sequence
  synthetic sequence
aagagagaccaga

SEQ ID NO: 13340 - DNA, 13 bp, Artificial Sequence
  synthetic sequence
ggactttggttcc

SEQ ID NO: 13341 - DNA, 13 bp, Artificial Sequence
  synthetic sequence
gtgcagagtcgcc

SEQ ID NO: 13342 - DNA, 13 bp, Artificial Sequence
  synthetic sequence
ccatagtggaagg

SEQ ID NO: 13343 - DNA, 13 bp, Artificial Sequence
  synthetic sequence
tcatttatgtcgg

SEQ ID NO: 13344 - DNA, 13 bp, Artificial Sequence
  synthetic sequence
ggttggactggaa

SEQ ID NO: 13345 - DNA, 13 bp, Artificial Sequence
  synthetic sequence
gtttaatgatttg

SEQ ID NO: 13346 - DNA, 13 bp, Artificial Sequence
  synthetic sequence
gatgtgaatgtgg

SEQ ID NO: 13347 - DNA, 13 bp, Artificial Sequence
  synthetic sequence
ccccaaagatgct

SEQ ID NO: 13348 - DNA, 13 bp, Artificial Sequence
  synthetic sequence
cctgggggtagct

SEQ ID NO: 13349 - DNA, 13 bp, Artificial Sequence
  synthetic sequence
tgtcacacattgt

SEQ ID NO: 13350 - DNA, 13 bp, Artificial Sequence
  synthetic sequence
tgtgccactgccc

SEQ ID NO: 13351 - DNA, 13 bp, Artificial Sequence
  synthetic sequence
catcaatgtgcgc

SEQ ID NO: 13352 - DNA, 13 bp, Artificial Sequence
  synthetic sequence
ctgtgtgcagcgc

SEQ ID NO: 13353 - DNA, 13 bp, Artificial Sequence
  synthetic sequence
tcaaccagtcgct

SEQ ID NO: 13354 - DNA, 13 bp, Artificial Sequence
  synthetic sequence
ggaaggtgttcca

SEQ ID NO: 13355 - DNA, 13 bp, Artificial Sequence
  synthetic sequence
tgtggctcaacct

SEQ ID NO: 13356 - DNA, 13 bp, Artificial Sequence
  synthetic sequence
tgcccttcctggt

SEQ ID NO: 13357 - DNA, 13 bp, Artificial Sequence
  synthetic sequence
ccatagtccccca

SEQ ID NO: 13358 - DNA, 13 bp, Artificial Sequence
  synthetic sequence
ttgccccagcctc

SEQ ID NO: 13359 - DNA, 13 bp, Artificial Sequence
  synthetic sequence
ccgccgaggactg

SEQ ID NO: 13360 - DNA, 13 bp, Artificial Sequence
  synthetic sequence
tcagtctctcgat

SEQ ID NO: 13361 - DNA, 13 bp, Artificial Sequence
  synthetic sequence
atgctgccttttc

SEQ ID NO: 13362 - DNA, 13 bp, Artificial Sequence
  synthetic sequence
gaggagaccgtga

SEQ ID NO: 13363 - DNA, 13 bp, Artificial Sequence
  synthetic sequence
acacgatcttgtt

SEQ ID NO: 13364 - DNA, 13 bp, Artificial Sequence
  synthetic sequence
agctcaagaatga

SEQ ID NO: 13365 - DNA, 13 bp, Artificial Sequence
  synthetic sequence
gagctccaaattc

SEQ ID NO: 13366 - DNA, 13 bp, Artificial Sequence
  synthetic sequence
ttccaaacaatcc

SEQ ID NO: 13367 - DNA, 13 bp, Artificial Sequence
  synthetic sequence
gccacaggaaccc

SEQ ID NO: 13368 - DNA, 13 bp, Artificial Sequence
  synthetic sequence
ctgttgaaggcgc

SEQ ID NO: 13369 - DNA, 13 bp, Artificial Sequence
  synthetic sequence
accgccaaggact

SEQ ID NO: 13370 - DNA, 13 bp, Artificial Sequence
  synthetic sequence
tgttccagagaac

SEQ ID NO: 13371 - DNA, 13 bp, Artificial Sequence
  synthetic sequence
ctccataatcccc

SEQ ID NO: 13372 - DNA, 13 bp, Artificial Sequence
  synthetic sequence
atgtgaacttcgt

SEQ ID NO: 13373 - DNA, 13 bp, Artificial Sequence
  synthetic sequence
ttggcgtcataca

SEQ ID NO: 13374 - DNA, 13 bp, Artificial Sequence
  synthetic sequence
atttctatgaagc

SEQ ID NO: 13375 - DNA, 13 bp, Artificial Sequence
  synthetic sequence
cttttgaaaaacc

SEQ ID NO: 13376 - DNA, 13 bp, Artificial Sequence
  synthetic sequence
gtcggaaggtgtg

SEQ ID NO: 13377 - DNA, 13 bp, Artificial Sequence
  synthetic sequence
caaactcaaccaa

SEQ ID NO: 13378 - DNA, 13 bp, Artificial Sequence
  synthetic sequence
tgagagaagccca

SEQ ID NO: 13379 - DNA, 13 bp, Artificial Sequence
  synthetic sequence
acggaccgacaag

SEQ ID NO: 13380 - DNA, 13 bp, Artificial Sequence
  synthetic sequence
gagagggtctctt

SEQ ID NO: 13381 - DNA, 13 bp, Artificial Sequence
  synthetic sequence
tccgacacgatcc

SEQ ID NO: 13382 - DNA, 13 bp, Artificial Sequence
  synthetic sequence
tggagatcgggct

SEQ ID NO: 13383 - DNA, 13 bp, Artificial Sequence
  synthetic sequence
cgtcaatgccaga

SEQ ID NO: 13384 - DNA, 13 bp, Artificial Sequence
  synthetic sequence
ggcatttgctagg

SEQ ID NO: 13385 - DNA, 13 bp, Artificial Sequence
  synthetic sequence
ccgcagtttgagg

SEQ ID NO: 13386 - DNA, 13 bp, Artificial Sequence
  synthetic sequence
aggcaagtctggc

SEQ ID NO: 13387 - DNA, 13 bp, Artificial Sequence
  synthetic sequence
tggccgaaaaggg

SEQ ID NO: 13388 - DNA, 13 bp, Artificial Sequence
  synthetic sequence
tcgtaaacaggta

SEQ ID NO: 13389 - DNA, 13 bp, Artificial Sequence
  synthetic sequence
taagctgaagaaa

SEQ ID NO: 13390 - DNA, 13 bp, Artificial Sequence
  synthetic sequence
agtcgtcaacggt

SEQ ID NO: 13391 - DNA, 13 bp, Artificial Sequence
  synthetic sequence
ggcacctgccgtc

SEQ ID NO: 13392 - DNA, 13 bp, Artificial Sequence
  synthetic sequence
gcctccacgacga

SEQ ID NO: 13393 - DNA, 13 bp, Artificial Sequence
  synthetic sequence
aagcagttgcaaa

SEQ ID NO: 13394 - DNA, 13 bp, Artificial Sequence
  synthetic sequence
tggtgcgagggga

SEQ ID NO: 13395 - DNA, 13 bp, Artificial Sequence
  synthetic sequence
cccttccatgaat

SEQ ID NO: 13396 - DNA, 13 bp, Artificial Sequence
  synthetic sequence
atgactccagaaa

SEQ ID NO: 13397 - DNA, 13 bp, Artificial Sequence
  synthetic sequence
ccatggataaaaa

SEQ ID NO: 13398 - DNA, 13 bp, Artificial Sequence
  synthetic sequence
gcagatgtagcca

SEQ ID NO: 13399 - DNA, 13 bp, Artificial Sequence
  synthetic sequence
gattccactgttg

SEQ ID NO: 13400 - DNA, 13 bp, Artificial Sequence
  synthetic sequence
agtgcgcagccga

SEQ ID NO: 13401 - DNA, 13 bp, Artificial Sequence
  synthetic sequence
caggctatgctgc

SEQ ID NO: 13402 - DNA, 13 bp, Artificial Sequence
  synthetic sequence
ggtacaaggtgaa

SEQ ID NO: 13403 - DNA, 13 bp, Artificial Sequence
  synthetic sequence
gacaacctggcgg

SEQ ID NO: 13404 - DNA, 13 bp, Artificial Sequence
  synthetic sequence
tgaaaccatccaa

SEQ ID NO: 13405 - DNA, 13 bp, Artificial Sequence
  synthetic sequence
tactcaagagtga

SEQ ID NO: 13406 - DNA, 13 bp, Artificial Sequence
  synthetic sequence
gtggtccgtcagc

SEQ ID NO: 13407 - DNA, 13 bp, Artificial Sequence
  synthetic sequence
ttccattgccgaa

SEQ ID NO: 13408 - DNA, 13 bp, Artificial Sequence
  synthetic sequence
atgaccactgaac

SEQ ID NO: 13409 - DNA, 13 bp, Artificial Sequence
  synthetic sequence
acagtattcagga

SEQ ID NO: 13410 - DNA, 13 bp, Artificial Sequence
  synthetic sequence
aaggcccgtacgc

SEQ ID NO: 13411 - DNA, 13 bp, Artificial Sequence
  synthetic sequence
catactctaccaa

SEQ ID NO: 13412 - DNA, 13 bp, Artificial Sequence
  synthetic sequence
gaagggcagaact

SEQ ID NO: 13413 - DNA, 13 bp, Artificial Sequence
  synthetic sequence
aaagtgcatttta

SEQ ID NO: 13414 - DNA, 13 bp, Artificial Sequence
  synthetic sequence
agcgctcatagcc

SEQ ID NO: 13415 - DNA, 13 bp, Artificial Sequence
  synthetic sequence
ggttctttggact

SEQ ID NO: 13416 - DNA, 13 bp, Artificial Sequence
  synthetic sequence
tgttttacgacaa

SEQ ID NO: 13417 - DNA, 13 bp, Artificial Sequence
  synthetic sequence
gatccgcgcataa

SEQ ID NO: 13418 - DNA, 13 bp, Artificial Sequence
  synthetic sequence
caagaggctgggg

SEQ ID NO: 13419 - DNA, 13 bp, Artificial Sequence
  synthetic sequence
gaggccaatgagc

SEQ ID NO: 13420 - DNA, 13 bp, Artificial Sequence
  synthetic sequence
gcctgaggctacc

SEQ ID NO: 13421 - DNA, 13 bp, Artificial Sequence
  synthetic sequence
atttggaagggac

SEQ ID NO: 13422 - DNA, 13 bp, Artificial Sequence
  synthetic sequence
acaccctggaggg

SEQ ID NO: 13423 - DNA, 13 bp, Artificial Sequence
  synthetic sequence
tgcaagtcgaggc

SEQ ID NO: 13424 - DNA, 13 bp, Artificial Sequence
  synthetic sequence
aggagctcgaggc

SEQ ID NO: 13425 - DNA, 13 bp, Artificial Sequence
  synthetic sequence
gcacatcttggag

SEQ ID NO: 13426 - DNA, 13 bp, Artificial Sequence
  synthetic sequence
ccagcgaaagcat

SEQ ID NO: 13427 - DNA, 13 bp, Artificial Sequence
  synthetic sequence
gtggaggagatat

SEQ ID NO: 13428 - DNA, 13 bp, Artificial Sequence
  synthetic sequence
ggcgaatacctgt

SEQ ID NO: 13429 - DNA, 13 bp, Artificial Sequence
  synthetic sequence
gccattaagctta

SEQ ID NO: 13430 - DNA, 13 bp, Artificial Sequence
  synthetic sequence
catatcattcatg

SEQ ID NO: 13431 - DNA, 13 bp, Artificial Sequence
  synthetic sequence
ctcgtggaaacac

SEQ ID NO: 13432 - DNA, 13 bp, Artificial Sequence
  synthetic sequence
accaggactagaa

SEQ ID NO: 13433 - DNA, 13 bp, Artificial Sequence
  synthetic sequence
agaacgcccgaac

SEQ ID NO: 13434 - DNA, 13 bp, Artificial Sequence
  synthetic sequence
ggcccaacttcaa

SEQ ID NO: 13435 - DNA, 13 bp, Artificial Sequence
  synthetic sequence
tcaagcttagcat

SEQ ID NO: 13436 - DNA, 13 bp, Artificial Sequence
  synthetic sequence
gacgactcttcgg

SEQ ID NO: 13437 - DNA, 13 bp, Artificial Sequence
  synthetic sequence
aagcccagcgagc

SEQ ID NO: 13438 - DNA, 13 bp, Artificial Sequence
  synthetic sequence
ccatcatgaggca

SEQ ID NO: 13439 - DNA, 13 bp, Artificial Sequence
  synthetic sequence
tcatgggccgcct

SEQ ID NO: 13440 - DNA, 13 bp, Artificial Sequence
  synthetic sequence
cagtgaaagcatc

SEQ ID NO: 13441 - DNA, 13 bp, Artificial Sequence
  synthetic sequence
cagcgtcagccga

SEQ ID NO: 13442 - DNA, 13 bp, Artificial Sequence
  synthetic sequence
ggagtgaataggg

SEQ ID NO: 13443 - DNA, 13 bp, Artificial Sequence
  synthetic sequence
cgtatctggaagg

SEQ ID NO: 13444 - DNA, 13 bp, Artificial Sequence
  synthetic sequence
ttgcaacggaggc

SEQ ID NO: 13445 - DNA, 13 bp, Artificial Sequence
  synthetic sequence
tggatttaggtat

SEQ ID NO: 13446 - DNA, 13 bp, Artificial Sequence
  synthetic sequence
cgatcatcatcga

SEQ ID NO: 13447 - DNA, 13 bp, Artificial Sequence
  synthetic sequence
gagactccggagc

SEQ ID NO: 13448 - DNA, 13 bp, Artificial Sequence
  synthetic sequence
tgaataaagaagt

SEQ ID NO: 13449 - DNA, 13 bp, Artificial Sequence
  synthetic sequence
tttaaccacgaga

SEQ ID NO: 13450 - DNA, 13 bp, Artificial Sequence
  synthetic sequence
ctcctctcttgta

SEQ ID NO: 13451 - DNA, 13 bp, Artificial Sequence
  synthetic sequence
gagtgtgttatca

SEQ ID NO: 13452 - DNA, 13 bp, Artificial Sequence
  synthetic sequence
gccactgcttcct

SEQ ID NO: 13453 - DNA, 13 bp, Artificial Sequence
  synthetic sequence
tcaatgtgtctgt

SEQ ID NO: 13454 - DNA, 13 bp, Artificial Sequence
  synthetic sequence
tttcttggcgctc

SEQ ID NO: 13455 - DNA, 13 bp, Artificial Sequence
  synthetic sequence
tcatcggacagat

SEQ ID NO: 13456 - DNA, 13 bp, Artificial Sequence
  synthetic sequence
tctgccaactgtt

SEQ ID NO: 13457 - DNA, 13 bp, Artificial Sequence
  synthetic sequence
tatacatcctggt

SEQ ID NO: 13458 - DNA, 13 bp, Artificial Sequence
  synthetic sequence
ctatggttggtac

SEQ ID NO: 13459 - DNA, 13 bp, Artificial Sequence
  synthetic sequence
ggctgtaaatcga

SEQ ID NO: 13460 - DNA, 13 bp, Artificial Sequence
  synthetic sequence
tgagtggaaatcg

SEQ ID NO: 13461 - DNA, 13 bp, Artificial Sequence
  synthetic sequence
gtcgcaactaact

SEQ ID NO: 13462 - DNA, 13 bp, Artificial Sequence
  synthetic sequence
ctcagagcttgaa

SEQ ID NO: 13463 - DNA, 13 bp, Artificial Sequence
  synthetic sequence
atgctctgcttgc

SEQ ID NO: 13464 - DNA, 13 bp, Artificial Sequence
  synthetic sequence
tatgccagtcatt

SEQ ID NO: 13465 - DNA, 13 bp, Artificial Sequence
  synthetic sequence
attttcttgtcca

SEQ ID NO: 13466 - DNA, 13 bp, Artificial Sequence
  synthetic sequence
acctccgtttcga

SEQ ID NO: 13467 - DNA, 13 bp, Artificial Sequence
  synthetic sequence
agtaatttgttct

SEQ ID NO: 13468 - DNA, 13 bp, Artificial Sequence
  synthetic sequence
cgacggggcattt

SEQ ID NO: 13469 - DNA, 13 bp, Artificial Sequence
  synthetic sequence
gctgccgtcatta

SEQ ID NO: 13470 - DNA, 13 bp, Artificial Sequence
  synthetic sequence
atcaaagtcggat

SEQ ID NO: 13471 - DNA, 13 bp, Artificial Sequence
  synthetic sequence
ctatcctcttctt

SEQ ID NO: 13472 - DNA, 13 bp, Artificial Sequence
  synthetic sequence
tcagcgctcctcc

SEQ ID NO: 13473 - DNA, 13 bp, Artificial Sequence
  synthetic sequence
tttgcatccattc

SEQ ID NO: 13474 - DNA, 13 bp, Artificial Sequence
  synthetic sequence
cctttatcaagcc

SEQ ID NO: 13475 - DNA, 13 bp, Artificial Sequence
  synthetic sequence
tataggctgggag

SEQ ID NO: 13476 - DNA, 13 bp, Artificial Sequence
  synthetic sequence
ggccacatggcat

SEQ ID NO: 13477 - DNA, 13 bp, Artificial Sequence
  synthetic sequence
actatctctgctg

SEQ ID NO: 13478 - DNA, 13 bp, Artificial Sequence
  synthetic sequence
gtaatgagaggtg

SEQ ID NO: 13479 - DNA, 13 bp, Artificial Sequence
  synthetic sequence
aaagaactcttcg

SEQ ID NO: 13480 - DNA, 13 bp, Artificial Sequence
  synthetic sequence
ttctcgtggtaga

SEQ ID NO: 13481 - DNA, 13 bp, Artificial Sequence
  synthetic sequence
gctgccaaaggtg

SEQ ID NO: 13482 - DNA, 13 bp, Artificial Sequence
  synthetic sequence
tatcccagtgatt

SEQ ID NO: 13483 - DNA, 13 bp, Artificial Sequence
  synthetic sequence
gatgaaagcttgt

SEQ ID NO: 13484 - DNA, 13 bp, Artificial Sequence
  synthetic sequence
tgtgggtgttcat

SEQ ID NO: 13485 - DNA, 13 bp, Artificial Sequence
  synthetic sequence
ggacgttcacatg

SEQ ID NO: 13486 - DNA, 13 bp, Artificial Sequence
  synthetic sequence
gccctagcccagt

SEQ ID NO: 13487 - DNA, 13 bp, Artificial Sequence
  synthetic sequence
aagtcacagattt

SEQ ID NO: 13488 - DNA, 13 bp, Artificial Sequence
  synthetic sequence
agcctatccagta

SEQ ID NO: 13489 - DNA, 13 bp, Artificial Sequence
  synthetic sequence
ttcatggtattgg

SEQ ID NO: 13490 - DNA, 13 bp, Artificial Sequence
  synthetic sequence
acaagctttcttg

SEQ ID NO: 13491 - DNA, 13 bp, Artificial Sequence
  synthetic sequence
cctatgttacgag

SEQ ID NO: 13492 - DNA, 13 bp, Artificial Sequence
  synthetic sequence
gtcgcgccagaaa

SEQ ID NO: 13493 - DNA, 13 bp, Artificial Sequence
  synthetic sequence
acttgaactgccg

SEQ ID NO: 13494 - DNA, 13 bp, Artificial Sequence
  synthetic sequence
ctttgttcccgga

SEQ ID NO: 13495 - DNA, 13 bp, Artificial Sequence
  synthetic sequence
tctcgtagtccta

SEQ ID NO: 13496 - DNA, 13 bp, Artificial Sequence
  synthetic sequence
agcactgcctttt

SEQ ID NO: 13497 - DNA, 13 bp, Artificial Sequence
  synthetic sequence
tcactccttcggt

SEQ ID NO: 13498 - DNA, 13 bp, Artificial Sequence
  synthetic sequence
agatcgtcctgct

SEQ ID NO: 13499 - DNA, 13 bp, Artificial Sequence
  synthetic sequence
ttttgcctgggac

SEQ ID NO: 13500 - DNA, 13 bp, Artificial Sequence
  synthetic sequence
gttcaggtgtccc

SEQ ID NO: 13501 - DNA, 13 bp, Artificial Sequence
  synthetic sequence
gacctgctaggag

SEQ ID NO: 13502 - DNA, 13 bp, Artificial Sequence
  synthetic sequence
cttggcccaacac

SEQ ID NO: 13503 - DNA, 13 bp, Artificial Sequence
  synthetic sequence
ttcatgtcataga

SEQ ID NO: 13504 - DNA, 13 bp, Artificial Sequence
  synthetic sequence
agtgacggtgttc

SEQ ID NO: 13505 - DNA, 13 bp, Artificial Sequence
  synthetic sequence
gtcctcacattaa

SEQ ID NO: 13506 - DNA, 13 bp, Artificial Sequence
  synthetic sequence
gtccttacattaa

SEQ ID NO: 13507 - DNA, 13 bp, Artificial Sequence
  synthetic sequence
agtattcatgtca

SEQ ID NO: 13508 - DNA, 13 bp, Artificial Sequence
  synthetic sequence
cctgctaggtgcg

SEQ ID NO: 13509 - DNA, 13 bp, Artificial Sequence
  synthetic sequence
gacctgctgggag

SEQ ID NO: 13510 - DNA, 13 bp, Artificial Sequence
  synthetic sequence
tcagtaccggcac

SEQ ID NO: 13511 - DNA, 13 bp, Artificial Sequence
  synthetic sequence
agatcgtcctgtt

SEQ ID NO: 13512 - DNA, 13 bp, Artificial Sequence
  synthetic sequence
ttgctgttagcag

SEQ ID NO: 13513 - DNA, 13 bp, Artificial Sequence
  synthetic sequence
ccctctgtggatt

SEQ ID NO: 13514 - DNA, 13 bp, Artificial Sequence
  synthetic sequence
gacagcttctccc

SEQ ID NO: 13515 - DNA, 13 bp, Artificial Sequence
  synthetic sequence
gtctcgtagtccg

SEQ ID NO: 13516 - DNA, 13 bp, Artificial Sequence
  synthetic sequence
aagccgcactgtt

SEQ ID NO: 13517 - DNA, 13 bp, Artificial Sequence
  synthetic sequence
ttcggcttacata

SEQ ID NO: 13518 - DNA, 13 bp, Artificial Sequence
  synthetic sequence
gttcaatgattgg

SEQ ID NO: 13519 - DNA, 13 bp, Artificial Sequence
  synthetic sequence
tccataacgtcgg

SEQ ID NO: 13520 - DNA, 13 bp, Artificial Sequence
  synthetic sequence
tccttgcgaagta

SEQ ID NO: 13521 - DNA, 13 bp, Artificial Sequence
  synthetic sequence
tggagtcctcacg

SEQ ID NO: 13522 - DNA, 13 bp, Artificial Sequence
  synthetic sequence
ctagccctgctag

SEQ ID NO: 13523 - DNA, 13 bp, Artificial Sequence
  synthetic sequence
ttcagcaccggca

SEQ ID NO: 13524 - DNA, 13 bp, Artificial Sequence
  synthetic sequence
aggtgacgtagta

SEQ ID NO: 13525 - DNA, 13 bp, Artificial Sequence
  synthetic sequence
tctgaaccgtggt

SEQ ID NO: 13526 - DNA, 13 bp, Artificial Sequence
  synthetic sequence
gtcgaccaagaat

SEQ ID NO: 13527 - DNA, 13 bp, Artificial Sequence
  synthetic sequence
gatgaaaccactc

SEQ ID NO: 13528 - DNA, 13 bp, Artificial Sequence
  synthetic sequence
tattcaagcatcc

SEQ ID NO: 13529 - DNA, 13 bp, Artificial Sequence
  synthetic sequence
agagtctgggccc

SEQ ID NO: 13530 - DNA, 13 bp, Artificial Sequence
  synthetic sequence
tgcgggtccctcg

SEQ ID NO: 13531 - DNA, 13 bp, Artificial Sequence
  synthetic sequence
ggagcctctgcga

SEQ ID NO: 13532 - DNA, 13 bp, Artificial Sequence
  synthetic sequence
catcggaattaac

SEQ ID NO: 13533 - DNA, 13 bp, Artificial Sequence
  synthetic sequence
ggatcttattagg

SEQ ID NO: 13534 - DNA, 13 bp, Artificial Sequence
  synthetic sequence
gagaacacacaac

SEQ ID NO: 13535 - DNA, 13 bp, Artificial Sequence
  synthetic sequence
gcagtccagtatg

SEQ ID NO: 13536 - DNA, 13 bp, Artificial Sequence
  synthetic sequence
cgatgacttcaca

SEQ ID NO: 13537 - DNA, 13 bp, Artificial Sequence
  synthetic sequence
gaacgtcgacaat

SEQ ID NO: 13538 - DNA, 13 bp, Artificial Sequence
  synthetic sequence
caatgtcctccag

SEQ ID NO: 13539 - DNA, 13 bp, Artificial Sequence
  synthetic sequence
acgtcccctacac

SEQ ID NO: 13540 - DNA, 13 bp, Artificial Sequence
  synthetic sequence
acacgcctacagt

SEQ ID NO: 13541 - DNA, 13 bp, Artificial Sequence
  synthetic sequence
caccaacaatttt

SEQ ID NO: 13542 - DNA, 13 bp, Artificial Sequence
  synthetic sequence
agcccacaagcaa

SEQ ID NO: 13543 - DNA, 13 bp, Artificial Sequence
  synthetic sequence
taggaggtgcaaa

SEQ ID NO: 13544 - DNA, 13 bp, Artificial Sequence
  synthetic sequence
gacgccttcgaac

SEQ ID NO: 13545 - DNA, 13 bp, Artificial Sequence
  synthetic sequence
accgtttctctgg

SEQ ID NO: 13546 - DNA, 13 bp, Artificial Sequence
  synthetic sequence
tgcgagcagacgc

SEQ ID NO: 13547 - DNA, 13 bp, Artificial Sequence
  synthetic sequence
aagtcggcctgcg

SEQ ID NO: 13548 - DNA, 13 bp, Artificial Sequence
  synthetic sequence
gcgtggtgcataa

SEQ ID NO: 13549 - DNA, 13 bp, Artificial Sequence
  synthetic sequence
ttagaatccaggt

SEQ ID NO: 13550 - DNA, 13 bp, Artificial Sequence
  synthetic sequence
aacacacgtagat

SEQ ID NO: 13551 - DNA, 13 bp, Artificial Sequence
  synthetic sequence
gggacattgtcca

SEQ ID NO: 13552 - DNA, 13 bp, Artificial Sequence
  synthetic sequence
gcgactacagcac

SEQ ID NO: 13553 - DNA, 13 bp, Artificial Sequence
  synthetic sequence
gggccgatatcag

SEQ ID NO: 13554 - DNA, 13 bp, Artificial Sequence
  synthetic sequence
gtacccacagcat

SEQ ID NO: 13555 - DNA, 13 bp, Artificial Sequence
  synthetic sequence
ctaatccgccgcc

SEQ ID NO: 13556 - DNA, 13 bp, Artificial Sequence
  synthetic sequence
gacgttccccaga

SEQ ID NO: 13557 - DNA, 13 bp, Artificial Sequence
  synthetic sequence
gtagagaggagta

SEQ ID NO: 13558 - DNA, 13 bp, Artificial Sequence
  synthetic sequence
aggaagcgtcagg

SEQ ID NO: 13559 - DNA, 13 bp, Artificial Sequence
  synthetic sequence
caaaccctcctag

SEQ ID NO: 13560 - DNA, 13 bp, Artificial Sequence
  synthetic sequence
ggtaggcactgca

SEQ ID NO: 13561 - DNA, 13 bp, Artificial Sequence
  synthetic sequence
gacatcaaggaag

SEQ ID NO: 13562 - DNA, 13 bp, Artificial Sequence
  synthetic sequence
aagcctaaaccag

SEQ ID NO: 13563 - DNA, 13 bp, Artificial Sequence
  synthetic sequence
caacactatatca

SEQ ID NO: 13564 - DNA, 13 bp, Artificial Sequence
  synthetic sequence
aacgcaagcctaa

SEQ ID NO: 13565 - DNA, 13 bp, Artificial Sequence
  synthetic sequence
gacagcgtatgtg

SEQ ID NO: 13566 - DNA, 13 bp, Artificial Sequence
  synthetic sequence
cgaccacgaccat

SEQ ID NO: 13567 - DNA, 13 bp, Artificial Sequence
  synthetic sequence
tttataagactca

SEQ ID NO: 13568 - DNA, 13 bp, Artificial Sequence
  synthetic sequence
ggtggtttgtcgc

SEQ ID NO: 13569 - DNA, 13 bp, Artificial Sequence
  synthetic sequence
cattcgtaggtga

SEQ ID NO: 13570 - DNA, 13 bp, Artificial Sequence
  synthetic sequence
atgaaagggtaca

SEQ ID NO: 13571 - DNA, 13 bp, Artificial Sequence
  synthetic sequence
tcggccggtggtt

SEQ ID NO: 13572 - DNA, 13 bp, Artificial Sequence
  synthetic sequence
tatgtcagtgcgg

SEQ ID NO: 13573 - DNA, 13 bp, Artificial Sequence
  synthetic sequence
ttctttttaggct

SEQ ID NO: 13574 - DNA, 13 bp, Artificial Sequence
  synthetic sequence
gcaggggtcgtcc

SEQ ID NO: 13575 - DNA, 13 bp, Artificial Sequence
  synthetic sequence
gcaggtcacgtac

SEQ ID NO: 13576 - DNA, 13 bp, Artificial Sequence
  synthetic sequence
acctcctaagatc

SEQ ID NO: 13577 - DNA, 13 bp, Artificial Sequence
  synthetic sequence
gatcggaaatgtc

SEQ ID NO: 13578 - DNA, 13 bp, Artificial Sequence
  synthetic sequence
tgatgacgacctt

SEQ ID NO: 13579 - DNA, 13 bp, Artificial Sequence
  synthetic sequence
atacgtactccag

SEQ ID NO: 13580 - DNA, 13 bp, Artificial Sequence
  synthetic sequence
tttattgggctga

SEQ ID NO: 13581 - DNA, 13 bp, Artificial Sequence
  synthetic sequence
cagtgcaagcagc

SEQ ID NO: 13582 - DNA, 13 bp, Artificial Sequence
  synthetic sequence
tgtaggcaatgca

SEQ ID NO: 13583 - DNA, 13 bp, Artificial Sequence
  synthetic sequence
tgtcaatcgagat

SEQ ID NO: 13584 - DNA, 13 bp, Artificial Sequence
  synthetic sequence
gtgttatgctgcc

SEQ ID NO: 13585 - DNA, 13 bp, Artificial Sequence
  synthetic sequence
atttcaagacgtt

SEQ ID NO: 13586 - DNA, 13 bp, Artificial Sequence
  synthetic sequence
ttgcagtcaggtg

SEQ ID NO: 13587 - DNA, 13 bp, Artificial Sequence
  synthetic sequence
cgcgtatggcgtc

SEQ ID NO: 13588 - DNA, 13 bp, Artificial Sequence
  synthetic sequence
tcagctttgtact

SEQ ID NO: 13589 - DNA, 13 bp, Artificial Sequence
  synthetic sequence
ccttcttcaattt

SEQ ID NO: 13590 - DNA, 13 bp, Artificial Sequence
  synthetic sequence
cttatacgggatc

SEQ ID NO: 13591 - DNA, 13 bp, Artificial Sequence
  synthetic sequence
ctttgtggccaag

SEQ ID NO: 13592 - DNA, 13 bp, Artificial Sequence
  synthetic sequence
atgccgatgataa

SEQ ID NO: 13593 - DNA, 13 bp, Artificial Sequence
  synthetic sequence
agtacatcgagtt

SEQ ID NO: 13594 - DNA, 13 bp, Artificial Sequence
  synthetic sequence
ctgcacagcatta

SEQ ID NO: 13595 - DNA, 13 bp, Artificial Sequence
  synthetic sequence
gcctgcctgattg

SEQ ID NO: 13596 - DNA, 13 bp, Artificial Sequence
  synthetic sequence
aagcagcggaaca

SEQ ID NO: 13597 - DNA, 13 bp, Artificial Sequence
  synthetic sequence
tggttccaagtga

SEQ ID NO: 13598 - DNA, 13 bp, Artificial Sequence
  synthetic sequence
agcgaactcgacg

SEQ ID NO: 13599 - DNA, 13 bp, Artificial Sequence
  synthetic sequence
cgtgaggaacctg

SEQ ID NO: 13600 - DNA, 13 bp, Artificial Sequence
  synthetic sequence
caaagtttctcca

SEQ ID NO: 13601 - DNA, 13 bp, Artificial Sequence
  synthetic sequence
cggcagacgtctc

SEQ ID NO: 13602 - DNA, 13 bp, Artificial Sequence
  synthetic sequence
gtgtcaagcggaa

SEQ ID NO: 13603 - DNA, 13 bp, Artificial Sequence
  synthetic sequence
ctccacggtgcat

SEQ ID NO: 13604 - DNA, 13 bp, Artificial Sequence
  synthetic sequence
ctctgcctctgtt

SEQ ID NO: 13605 - DNA, 13 bp, Artificial Sequence
  synthetic sequence
ggtggtttgtcac

SEQ ID NO: 13606 - DNA, 13 bp, Artificial Sequence
  synthetic sequence
aacttcctcctga

SEQ ID NO: 13607 - DNA, 13 bp, Artificial Sequence
  synthetic sequence
ctgtcgcctttcc

SEQ ID NO: 13608 - DNA, 13 bp, Artificial Sequence
  synthetic sequence
tcagcaacgggta

SEQ ID NO: 13609 - DNA, 13 bp, Artificial Sequence
  synthetic sequence
gccatcgtggtgg

SEQ ID NO: 13610 - DNA, 13 bp, Artificial Sequence
  synthetic sequence
tgggagatgctac

SEQ ID NO: 13611 - DNA, 13 bp, Artificial Sequence
  synthetic sequence
tccatgaaaatga

SEQ ID NO: 13612 - DNA, 13 bp, Artificial Sequence
  synthetic sequence
acggttcaacagc

SEQ ID NO: 13613 - DNA, 13 bp, Artificial Sequence
  synthetic sequence
tgaagtggacaaa

SEQ ID NO: 13614 - DNA, 13 bp, Artificial Sequence
  synthetic sequence
atccaaatgatca

SEQ ID NO: 13615 - DNA, 13 bp, Artificial Sequence
  synthetic sequence
ggacaatttgctt

SEQ ID NO: 13616 - DNA, 13 bp, Artificial Sequence
  synthetic sequence
gctgcccaaagaa

SEQ ID NO: 13617 - DNA, 13 bp, Artificial Sequence
  synthetic sequence
atgaaggaaatgc

SEQ ID NO: 13618 - DNA, 13 bp, Artificial Sequence
  synthetic sequence
atgatgactttct

SEQ ID NO: 13619 - DNA, 13 bp, Artificial Sequence
  synthetic sequence
tcttcggctggtt

SEQ ID NO: 13620 - DNA, 13 bp, Artificial Sequence
  synthetic sequence
cagctatgaaaga

SEQ ID NO: 13621 - DNA, 13 bp, Artificial Sequence
  synthetic sequence
tgcagaaccgcgt

SEQ ID NO: 13622 - DNA, 13 bp, Artificial Sequence
  synthetic sequence
gcggtgatcctga

SEQ ID NO: 13623 - DNA, 13 bp, Artificial Sequence
  synthetic sequence
tgggtgatcgcca

SEQ ID NO: 13624 - DNA, 13 bp, Artificial Sequence
  synthetic sequence
aaaggtaagtata

SEQ ID NO: 13625 - DNA, 13 bp, Artificial Sequence
  synthetic sequence
cagaacgcccagg

SEQ ID NO: 13626 - DNA, 13 bp, Artificial Sequence
  synthetic sequence
ggccgatcttcgc

SEQ ID NO: 13627 - DNA, 13 bp, Artificial Sequence
  synthetic sequence
gcgttcttcgccg

SEQ ID NO: 13628 - DNA, 13 bp, Artificial Sequence
  synthetic sequence
attttacaaccag

SEQ ID NO: 13629 - DNA, 13 bp, Artificial Sequence
  synthetic sequence
aaggcaagtatat

SEQ ID NO: 13630 - DNA, 13 bp, Artificial Sequence
  synthetic sequence
ggtttgttgagaa

SEQ ID NO: 13631 - DNA, 13 bp, Artificial Sequence
  synthetic sequence
caggtgcagaaca

SEQ ID NO: 13632 - DNA, 13 bp, Artificial Sequence
  synthetic sequence
ataatgtctatgc

SEQ ID NO: 13633 - DNA, 13 bp, Artificial Sequence
  synthetic sequence
atccgcgagcaga

SEQ ID NO: 13634 - DNA, 13 bp, Artificial Sequence
  synthetic sequence
aaggaaagtacat

SEQ ID NO: 13635 - DNA, 13 bp, Artificial Sequence
  synthetic sequence
cgacgatcaggat

SEQ ID NO: 13636 - DNA, 13 bp, Artificial Sequence
  synthetic sequence
ttttctcaagggt

SEQ ID NO: 13637 - DNA, 13 bp, Artificial Sequence
  synthetic sequence
catacctggatta

SEQ ID NO: 13638 - DNA, 13 bp, Artificial Sequence
  synthetic sequence
atggccgagctga

SEQ ID NO: 13639 - DNA, 13 bp, Artificial Sequence
  synthetic sequence
gttgacgcaggaa

SEQ ID NO: 13640 - DNA, 13 bp, Artificial Sequence
  synthetic sequence
ttgatgcagatac

SEQ ID NO: 13641 - DNA, 13 bp, Artificial Sequence
  synthetic sequence
taaccgatatgat

SEQ ID NO: 13642 - DNA, 13 bp, Artificial Sequence
  synthetic sequence
ggagaatttgcca

SEQ ID NO: 13643 - DNA, 13 bp, Artificial Sequence
  synthetic sequence
ccatcaggaagct

SEQ ID NO: 13644 - DNA, 13 bp, Artificial Sequence
  synthetic sequence
aagtcgtattgcg

SEQ ID NO: 13645 - DNA, 13 bp, Artificial Sequence
  synthetic sequence
ccatcgtcgtggt

SEQ ID NO: 13646 - DNA, 13 bp, Artificial Sequence
  synthetic sequence
ccgttaacggctt

SEQ ID NO: 13647 - DNA, 13 bp, Artificial Sequence
  synthetic sequence
ctgaagatgcgac

SEQ ID NO: 13648 - DNA, 13 bp, Artificial Sequence
  synthetic sequence
aatcctgtttcca

SEQ ID NO: 13649 - DNA, 13 bp, Artificial Sequence
  synthetic sequence
tacgcagcagggc

SEQ ID NO: 13650 - DNA, 13 bp, Artificial Sequence
  synthetic sequence
gctgtacaaggaa

SEQ ID NO: 13651 - DNA, 13 bp, Artificial Sequence
  synthetic sequence
tactaacaatcag

SEQ ID NO: 13652 - DNA, 13 bp, Artificial Sequence
  synthetic sequence
atcaaagtaacta

SEQ ID NO: 13653 - DNA, 13 bp, Artificial Sequence
  synthetic sequence
ctgaatcacaatt

SEQ ID NO: 13654 - DNA, 13 bp, Artificial Sequence
  synthetic sequence
tcctgattttatc

SEQ ID NO: 13655 - DNA, 13 bp, Artificial Sequence
  synthetic sequence
ttctgcgcgacgt

SEQ ID NO: 13656 - DNA, 13 bp, Artificial Sequence
  synthetic sequence
ccaacctttgatg

SEQ ID NO: 13657 - DNA, 13 bp, Artificial Sequence
  synthetic sequence
gcatgtcgtagcg

SEQ ID NO: 13658 - DNA, 13 bp, Artificial Sequence
  synthetic sequence
ggcggcctatcga

SEQ ID NO: 13659 - DNA, 13 bp, Artificial Sequence
  synthetic sequence
ctgagtttattat

SEQ ID NO: 13660 - DNA, 13 bp, Artificial Sequence
  synthetic sequence
tattcttgcaggg

SEQ ID NO: 13661 - DNA, 13 bp, Artificial Sequence
  synthetic sequence
atgcaaatgaaga

SEQ ID NO: 13662 - DNA, 13 bp, Artificial Sequence
  synthetic sequence
gacgatgcgatcg

SEQ ID NO: 13663 - DNA, 13 bp, Artificial Sequence
  synthetic sequence
aatactggcctga

SEQ ID NO: 13664 - DNA, 13 bp, Artificial Sequence
  synthetic sequence
agtcctgtaagta

SEQ ID NO: 13665 - DNA, 13 bp, Artificial Sequence
  synthetic sequence
tgaagatgcagca

SEQ ID NO: 13666 - DNA, 13 bp, Artificial Sequence
  synthetic sequence
ttctcgaactctt

SEQ ID NO: 13667 - DNA, 13 bp, Artificial Sequence
  synthetic sequence
ttattacacatgc

SEQ ID NO: 13668 - DNA, 13 bp, Artificial Sequence
  synthetic sequence
gcgggaggaacag

SEQ ID NO: 13669 - DNA, 13 bp, Artificial Sequence
  synthetic sequence
gctgaagcagccg

SEQ ID NO: 13670 - DNA, 13 bp, Artificial Sequence
  synthetic sequence
agaggtctttcat

SEQ ID NO: 13671 - DNA, 13 bp, Artificial Sequence
  synthetic sequence
agtattgtttatc

SEQ ID NO: 13672 - DNA, 13 bp, Artificial Sequence
  synthetic sequence
caacaattggaaa

SEQ ID NO: 13673 - DNA, 13 bp, Artificial Sequence
  synthetic sequence
gtgtgcaagcaca

SEQ ID NO: 13674 - DNA, 13 bp, Artificial Sequence
  synthetic sequence
gggttatcggtgc

SEQ ID NO: 13675 - DNA, 13 bp, Artificial Sequence
  synthetic sequence
aagcgcgtcagtt

SEQ ID NO: 13676 - DNA, 13 bp, Artificial Sequence
  synthetic sequence
ttttcgcctgggt

SEQ ID NO: 13677 - DNA, 13 bp, Artificial Sequence
  synthetic sequence
tgatcgagcccgg

SEQ ID NO: 13678 - DNA, 13 bp, Artificial Sequence
  synthetic sequence
ttctttggctggt

SEQ ID NO: 13679 - DNA, 13 bp, Artificial Sequence
  synthetic sequence
ggctgtgaggtcg

SEQ ID NO: 13680 - DNA, 13 bp, Artificial Sequence
  synthetic sequence
gactggctcacgc

SEQ ID NO: 13681 - DNA, 13 bp, Artificial Sequence
  synthetic sequence
tcttcatcgatcg

SEQ ID NO: 13682 - DNA, 13 bp, Artificial Sequence
  synthetic sequence
accaccagcacca

SEQ ID NO: 13683 - DNA, 13 bp, Artificial Sequence
  synthetic sequence
atccgatctacgt

SEQ ID NO: 13684 - DNA, 13 bp, Artificial Sequence
  synthetic sequence
gcgagatgatccc

SEQ ID NO: 13685 - DNA, 13 bp, Artificial Sequence
  synthetic sequence
cgtattcgccgga

SEQ ID NO: 13686 - DNA, 13 bp, Artificial Sequence
  synthetic sequence
tcatcgcccgctt

SEQ ID NO: 13687 - DNA, 13 bp, Artificial Sequence
  synthetic sequence
cagaactacttcg

SEQ ID NO: 13688 - DNA, 13 bp, Artificial Sequence
  synthetic sequence
aaagatgcagcta

SEQ ID NO: 13689 - DNA, 13 bp, Artificial Sequence
  synthetic sequence
tggtcgatgacgc

SEQ ID NO: 13690 - DNA, 13 bp, Artificial Sequence
  synthetic sequence
tcatttggacaag

SEQ ID NO: 13691 - DNA, 13 bp, Artificial Sequence
  synthetic sequence
cgctacaacggct

SEQ ID NO: 13692 - DNA, 13 bp, Artificial Sequence
  synthetic sequence
gcggcgttcttcc

SEQ ID NO: 13693 - DNA, 13 bp, Artificial Sequence
  synthetic sequence
ctgatcagcaagc

SEQ ID NO: 13694 - DNA, 13 bp, Artificial Sequence
  synthetic sequence
cggatatgtattc

SEQ ID NO: 13695 - DNA, 13 bp, Artificial Sequence
  synthetic sequence
tgccatgaagccg

SEQ ID NO: 13696 - DNA, 13 bp, Artificial Sequence
  synthetic sequence
ctaacagaagcta

SEQ ID NO: 13697 - DNA, 13 bp, Artificial Sequence
  synthetic sequence
tggtatattctgc

SEQ ID NO: 13698 - DNA, 13 bp, Artificial Sequence
  synthetic sequence
ggatacccgccat

SEQ ID NO: 13699 - DNA, 13 bp, Artificial Sequence
  synthetic sequence
acccaacgaccta

SEQ ID NO: 13700 - DNA, 13 bp, Artificial Sequence
  synthetic sequence
acgacagaatctt

SEQ ID NO: 13701 - DNA, 13 bp, Artificial Sequence
  synthetic sequence
ttcaggtccagaa

SEQ ID NO: 13702 - DNA, 13 bp, Artificial Sequence
  synthetic sequence
aagtgcagaaccg

SEQ ID NO: 13703 - DNA, 13 bp, Artificial Sequence
  synthetic sequence
ccccaaataacat

SEQ ID NO: 13704 - DNA, 13 bp, Artificial Sequence
  synthetic sequence
ctatgtataatca

SEQ ID NO: 13705 - DNA, 13 bp, Artificial Sequence
  synthetic sequence
acgcgacgagcac

SEQ ID NO: 13706 - DNA, 13 bp, Artificial Sequence
  synthetic sequence
aggagatcaaccg

SEQ ID NO: 13707 - DNA, 13 bp, Artificial Sequence
  synthetic sequence
acgttaatgaagg

SEQ ID NO: 13708 - DNA, 13 bp, Artificial Sequence
  synthetic sequence
gtgtcgaagatgt

SEQ ID NO: 13709 - DNA, 13 bp, Artificial Sequence
  synthetic sequence
cgtatagccgagg

SEQ ID NO: 13710 - DNA, 13 bp, Artificial Sequence
  synthetic sequence
caaatttcataag

SEQ ID NO: 13711 - DNA, 13 bp, Artificial Sequence
  synthetic sequence
gcgatccggtcac

SEQ ID NO: 13712 - DNA, 13 bp, Artificial Sequence
  synthetic sequence
tttccggcgtcgg

SEQ ID NO: 13713 - DNA, 13 bp, Artificial Sequence
  synthetic sequence
tttgcggttaacg

SEQ ID NO: 13714 - DNA, 13 bp, Artificial Sequence
  synthetic sequence
atttggtgttccg

SEQ ID NO: 13715 - DNA, 13 bp, Artificial Sequence
  synthetic sequence
ggcattactgttt

SEQ ID NO: 13716 - DNA, 13 bp, Artificial Sequence
  synthetic sequence
attgttcggacag

SEQ ID NO: 13717 - DNA, 13 bp, Artificial Sequence
  synthetic sequence
catggcttcgccg

SEQ ID NO: 13718 - DNA, 13 bp, Artificial Sequence
  synthetic sequence
catcgccttgacc

SEQ ID NO: 13719 - DNA, 13 bp, Artificial Sequence
  synthetic sequence
tggcgttcttggc

SEQ ID NO: 13720 - DNA, 13 bp, Artificial Sequence
  synthetic sequence
atggaaccgttct

SEQ ID NO: 13721 - DNA, 13 bp, Artificial Sequence
  synthetic sequence
tataaagaagaag

SEQ ID NO: 13722 - DNA, 13 bp, Artificial Sequence
  synthetic sequence
tgggtaaatattt

SEQ ID NO: 13723 - DNA, 13 bp, Artificial Sequence
  synthetic sequence
caggattacttcc

SEQ ID NO: 13724 - DNA, 13 bp, Artificial Sequence
  synthetic sequence
gcacgcggatcgt

SEQ ID NO: 13725 - DNA, 13 bp, Artificial Sequence
  synthetic sequence
gatgtctttcggt

SEQ ID NO: 13726 - DNA, 13 bp, Artificial Sequence
  synthetic sequence
cgacgacgcgatc

SEQ ID NO: 13727 - DNA, 13 bp, Artificial Sequence
  synthetic sequence
cttcaccggtact

SEQ ID NO: 13728 - DNA, 13 bp, Artificial Sequence
  synthetic sequence
caacacccttaat

SEQ ID NO: 13729 - DNA, 13 bp, Artificial Sequence
  synthetic sequence
tacggcgaagggc

SEQ ID NO: 13730 - DNA, 13 bp, Artificial Sequence
  synthetic sequence
tggatctgctcca

SEQ ID NO: 13731 - DNA, 13 bp, Artificial Sequence
  synthetic sequence
cgcgaggtgtcgt

SEQ ID NO: 13732 - DNA, 13 bp, Artificial Sequence
  synthetic sequence
cagaacttcctcg

SEQ ID NO: 13733 - DNA, 13 bp, Artificial Sequence
  synthetic sequence
ggggttatcggcg

SEQ ID NO: 13734 - DNA, 13 bp, Artificial Sequence
  synthetic sequence
tgatgaccttttc

SEQ ID NO: 13735 - DNA, 13 bp, Artificial Sequence
  synthetic sequence
tgtcgaaatggcg

SEQ ID NO: 13736 - DNA, 13 bp, Artificial Sequence
  synthetic sequence
tctatgttgacgt

SEQ ID NO: 13737 - DNA, 13 bp, Artificial Sequence
  synthetic sequence
tgcaggaaggttt

SEQ ID NO: 13738 - DNA, 13 bp, Artificial Sequence
  synthetic sequence
gcgtagttgcgca

SEQ ID NO: 13739 - DNA, 13 bp, Artificial Sequence
  synthetic sequence
accatacgtggat

SEQ ID NO: 13740 - DNA, 13 bp, Artificial Sequence
  synthetic sequence
tgcgtcaggtcac

SEQ ID NO: 13741 - DNA, 13 bp, Artificial Sequence
  synthetic sequence
accacttcgttaa

SEQ ID NO: 13742 - DNA, 13 bp, Artificial Sequence
  synthetic sequence
tgatgttcgccgg

SEQ ID NO: 13743 - DNA, 13 bp, Artificial Sequence
  synthetic sequence
accagataacggc

SEQ ID NO: 13744 - DNA, 13 bp, Artificial Sequence
  synthetic sequence
ctggtctgctcga

SEQ ID NO: 13745 - DNA, 13 bp, Artificial Sequence
  synthetic sequence
tgcactggcggtt

SEQ ID NO: 13746 - DNA, 13 bp, Artificial Sequence
  synthetic sequence
acagtggtaaagg

SEQ ID NO: 13747 - DNA, 13 bp, Artificial Sequence
  synthetic sequence
caacaacgcaacg

SEQ ID NO: 13748 - DNA, 13 bp, Artificial Sequence
  synthetic sequence
ccaacgttgaatc

SEQ ID NO: 13749 - DNA, 13 bp, Artificial Sequence
  synthetic sequence
gcgaaccagaacc

SEQ ID NO: 13750 - DNA, 13 bp, Artificial Sequence
  synthetic sequence
aaggcgatctggc

SEQ ID NO: 13751 - DNA, 13 bp, Artificial Sequence
  synthetic sequence
tggtattgatatc

SEQ ID NO: 13752 - DNA, 13 bp, Artificial Sequence
  synthetic sequence
gacgcgattgtgg

SEQ ID NO: 13753 - DNA, 13 bp, Artificial Sequence
  synthetic sequence
accctctgatgtc

SEQ ID NO: 13754 - DNA, 13 bp, Artificial Sequence
  synthetic sequence
gccgattataccg

SEQ ID NO: 13755 - DNA, 13 bp, Artificial Sequence
  synthetic sequence
ttgaattgtccgg

SEQ ID NO: 13756 - DNA, 13 bp, Artificial Sequence
  synthetic sequence
tagcccgtaaacg

SEQ ID NO: 13757 - DNA, 13 bp, Artificial Sequence
  synthetic sequence
taaatctggtctt

SEQ ID NO: 13758 - DNA, 13 bp, Artificial Sequence
  synthetic sequence
tcgaagaatggag

SEQ ID NO: 13759 - DNA, 13 bp, Artificial Sequence
  synthetic sequence
tggagttaattgc

SEQ ID NO: 13760 - DNA, 13 bp, Artificial Sequence
  synthetic sequence
cggttcctcgaca

SEQ ID NO: 13761 - DNA, 13 bp, Artificial Sequence
  synthetic sequence
ggccgatctttgc

SEQ ID NO: 13762 - DNA, 13 bp, Artificial Sequence
  synthetic sequence
ggttcaggtgcaa

SEQ ID NO: 13763 - DNA, 13 bp, Artificial Sequence
  synthetic sequence
aacgcgagcggca

SEQ ID NO: 13764 - DNA, 13 bp, Artificial Sequence
  synthetic sequence
ccttgaccgaacg

SEQ ID NO: 13765 - DNA, 13 bp, Artificial Sequence
  synthetic sequence
gaacacgatcacg

SEQ ID NO: 13766 - DNA, 13 bp, Artificial Sequence
  synthetic sequence
ggctgaactcttc

SEQ ID NO: 13767 - DNA, 13 bp, Artificial Sequence
  synthetic sequence
tagcaatttctaa

SEQ ID NO: 13768 - DNA, 13 bp, Artificial Sequence
  synthetic sequence
agaccgccaagag

SEQ ID NO: 13769 - DNA, 13 bp, Artificial Sequence
  synthetic sequence
gccagggctcaac

SEQ ID NO: 13770 - DNA, 13 bp, Artificial Sequence
  synthetic sequence
tcaccgcgtctgg

SEQ ID NO: 13771 - DNA, 13 bp, Artificial Sequence
  synthetic sequence
gctagtcctgtta

SEQ ID NO: 13772 - DNA, 13 bp, Artificial Sequence
  synthetic sequence
acccacgatccgc

SEQ ID NO: 13773 - DNA, 13 bp, Artificial Sequence
  synthetic sequence
tcagaatcgcgtt

SEQ ID NO: 13774 - DNA, 13 bp, Artificial Sequence
  synthetic sequence
cctacgcacctcc

SEQ ID NO: 13775 - DNA, 13 bp, Artificial Sequence
  synthetic sequence
gccatccccatca

SEQ ID NO: 13776 - DNA, 13 bp, Artificial Sequence
  synthetic sequence
tgcgcgattttcg

SEQ ID NO: 13777 - DNA, 13 bp, Artificial Sequence
  synthetic sequence
gcgcttttcgcag

SEQ ID NO: 13778 - DNA, 13 bp, Artificial Sequence
  synthetic sequence
cgattgcggaaaa

SEQ ID NO: 13779 - DNA, 13 bp, Artificial Sequence
  synthetic sequence
atcgaccgcgcca

SEQ ID NO: 13780 - DNA, 13 bp, Artificial Sequence
  synthetic sequence
tgctggtcggcgt

SEQ ID NO: 13781 - DNA, 13 bp, Artificial Sequence
  synthetic sequence
agcaacgatgcct

SEQ ID NO: 13782 - DNA, 13 bp, Artificial Sequence
  synthetic sequence
cggtcgatgtcga

SEQ ID NO: 13783 - DNA, 13 bp, Artificial Sequence
  synthetic sequence
tcaataccattcc

SEQ ID NO: 13784 - DNA, 13 bp, Artificial Sequence
  synthetic sequence
acgacttcatcaa

SEQ ID NO: 13785 - DNA, 13 bp, Artificial Sequence
  synthetic sequence
tgaaaaggcagag

SEQ ID NO: 13786 - DNA, 13 bp, Artificial Sequence
  synthetic sequence
gtatggggattag

SEQ ID NO: 13787 - DNA, 13 bp, Artificial Sequence
  synthetic sequence
acctggaagtaaa

SEQ ID NO: 13788 - DNA, 13 bp, Artificial Sequence
  synthetic sequence
ggctgctcagagg

SEQ ID NO: 13789 - DNA, 13 bp, Artificial Sequence
  synthetic sequence
tcgcttttaatac

SEQ ID NO: 13790 - DNA, 13 bp, Artificial Sequence
  synthetic sequence
gtcacctacgtgc

SEQ ID NO: 13791 - DNA, 13 bp, Artificial Sequence
  synthetic sequence
ctcgtcgcgttcc

SEQ ID NO: 13792 - DNA, 13 bp, Artificial Sequence
  synthetic sequence
cctctgcggcagt

SEQ ID NO: 13793 - DNA, 13 bp, Artificial Sequence
  synthetic sequence
aatcctatcttgg

SEQ ID NO: 13794 - DNA, 13 bp, Artificial Sequence
  synthetic sequence
tgatcgaggcgtt

SEQ ID NO: 13795 - DNA, 13 bp, Artificial Sequence
  synthetic sequence
atgaaaagtgcat

SEQ ID NO: 13796 - DNA, 13 bp, Artificial Sequence
  synthetic sequence
tgatcatattcat

SEQ ID NO: 13797 - DNA, 13 bp, Artificial Sequence
  synthetic sequence
gcaagcaaatgtg

SEQ ID NO: 13798 - DNA, 13 bp, Artificial Sequence
  synthetic sequence
ttaataccttgtt

SEQ ID NO: 13799 - DNA, 13 bp, Artificial Sequence
  synthetic sequence
ttatactatagcc

SEQ ID NO: 13800 - DNA, 13 bp, Artificial Sequence
  synthetic sequence
tcggtgtttaccg

SEQ ID NO: 13801 - DNA, 13 bp, Artificial Sequence
  synthetic sequence
gcgaaatgggaat

SEQ ID NO: 13802 - DNA, 13 bp, Artificial Sequence
  synthetic sequence
ttcccaacaaacg

SEQ ID NO: 13803 - DNA, 13 bp, Artificial Sequence
  synthetic sequence
ccctgctgctcag

SEQ ID NO: 13804 - DNA, 13 bp, Artificial Sequence
  synthetic sequence
ttatcgccgaacc

SEQ ID NO: 13805 - DNA, 13 bp, Artificial Sequence
  synthetic sequence
aaaagcaagtagg

SEQ ID NO: 13806 - DNA, 13 bp, Artificial Sequence
  synthetic sequence
ttcaggttcagaa

SEQ ID NO: 13807 - DNA, 13 bp, Artificial Sequence
  synthetic sequence
cattaaatgaagt

SEQ ID NO: 13808 - DNA, 13 bp, Artificial Sequence
  synthetic sequence
cttcgcctgggtg

SEQ ID NO: 13809 - DNA, 13 bp, Artificial Sequence
  synthetic sequence
ccagcataatatt

SEQ ID NO: 13810 - DNA, 13 bp, Artificial Sequence
  synthetic sequence
tggtggatgacgc

SEQ ID NO: 13811 - DNA, 13 bp, Artificial Sequence
  synthetic sequence
tcttacattaaac

SEQ ID NO: 13812 - DNA, 13 bp, Artificial Sequence
  synthetic sequence
aaattggacttcc

SEQ ID NO: 13813 - DNA, 13 bp, Artificial Sequence
  synthetic sequence
ttcgtgatcgatc

SEQ ID NO: 13814 - DNA, 13 bp, Artificial Sequence
  synthetic sequence
tcgtccaccacca

SEQ ID NO: 13815 - DNA, 13 bp, Artificial Sequence
  synthetic sequence
aaatcttcgacaa

SEQ ID NO: 13816 - DNA, 13 bp, Artificial Sequence
  synthetic sequence
aagcgcggcttct

SEQ ID NO: 13817 - DNA, 13 bp, Artificial Sequence
  synthetic sequence
acctgaccgcgct

SEQ ID NO: 13818 - DNA, 13 bp, Artificial Sequence
  synthetic sequence
tggtgccgttgtc

SEQ ID NO: 13819 - DNA, 13 bp, Artificial Sequence
  synthetic sequence
acattatccgctc

SEQ ID NO: 13820 - DNA, 13 bp, Artificial Sequence
  synthetic sequence
gaccagtccttga

SEQ ID NO: 13821 - DNA, 13 bp, Artificial Sequence
  synthetic sequence
atatggctctaat

SEQ ID NO: 13822 - DNA, 13 bp, Artificial Sequence
  synthetic sequence
acttctataagct

SEQ ID NO: 13823 - DNA, 13 bp, Artificial Sequence
  synthetic sequence
cagatcgtcatat

SEQ ID NO: 13824 - DNA, 13 bp, Artificial Sequence
  synthetic sequence
gaacaggccgatg

SEQ ID NO: 13825 - DNA, 13 bp, Artificial Sequence
  synthetic sequence
tagatgttcatgc

SEQ ID NO: 13826 - DNA, 13 bp, Artificial Sequence
  synthetic sequence
attcgcgagcaga

SEQ ID NO: 13827 - DNA, 13 bp, Artificial Sequence
  synthetic sequence
gggagtgaggtag

SEQ ID NO: 13828 - DNA, 13 bp, Artificial Sequence
  synthetic sequence
tggcgaagatgga

SEQ ID NO: 13829 - DNA, 13 bp, Artificial Sequence
  synthetic sequence
aagcgcatgagcg

SEQ ID NO: 13830 - DNA, 13 bp, Artificial Sequence
  synthetic sequence
gtacagcgaaagc

SEQ ID NO: 13831 - DNA, 13 bp, Artificial Sequence
  synthetic sequence
cgcacgaacgacg

SEQ ID NO: 13832 - DNA, 13 bp, Artificial Sequence
  synthetic sequence
cggcctgagcttc

SEQ ID NO: 13833 - DNA, 13 bp, Artificial Sequence
  synthetic sequence
caatacccatggt

SEQ ID NO: 13834 - DNA, 13 bp, Artificial Sequence
  synthetic sequence
ccatcgggatcag

SEQ ID NO: 13835 - DNA, 13 bp, Artificial Sequence
  synthetic sequence
catgtgccgctca

SEQ ID NO: 13836 - DNA, 13 bp, Artificial Sequence
  synthetic sequence
gacgatgccattg

SEQ ID NO: 13837 - DNA, 13 bp, Artificial Sequence
  synthetic sequence
gcgcacagcacca

SEQ ID NO: 13838 - DNA, 13 bp, Artificial Sequence
  synthetic sequence
tgccgctgttcct

SEQ ID NO: 13839 - DNA, 13 bp, Artificial Sequence
  synthetic sequence
ttgatctcgtcca

SEQ ID NO: 13840 - DNA, 13 bp, Artificial Sequence
  synthetic sequence
gtgctgcgcagaa

SEQ ID NO: 13841 - DNA, 13 bp, Artificial Sequence
  synthetic sequence
gtgtgatccgggt

SEQ ID NO: 13842 - DNA, 13 bp, Artificial Sequence
  synthetic sequence
gtcacttcaaaga

SEQ ID NO: 13843 - DNA, 13 bp, Artificial Sequence
  synthetic sequence
tcctgatcgatat

SEQ ID NO: 13844 - DNA, 13 bp, Artificial Sequence
  synthetic sequence
tcgtgccgatgag

SEQ ID NO: 13845 - DNA, 13 bp, Artificial Sequence
  synthetic sequence
aaaggtcaggaag

SEQ ID NO: 13846 - DNA, 13 bp, Artificial Sequence
  synthetic sequence
agaacgtccaggt

SEQ ID NO: 13847 - DNA, 13 bp, Artificial Sequence
  synthetic sequence
atttgcgcctgtt

SEQ ID NO: 13848 - DNA, 13 bp, Artificial Sequence
  synthetic sequence
tttcttatcgcgc

SEQ ID NO: 13849 - DNA, 13 bp, Artificial Sequence
  synthetic sequence
ttttaagtgcatg

SEQ ID NO: 13850 - DNA, 13 bp, Artificial Sequence
  synthetic sequence
ttactgacctgca

SEQ ID NO: 13851 - DNA, 13 bp, Artificial Sequence
  synthetic sequence
tggttttcctgct

SEQ ID NO: 13852 - DNA, 13 bp, Artificial Sequence
  synthetic sequence
gccagtagcgaga

SEQ ID NO: 13853 - DNA, 13 bp, Artificial Sequence
  synthetic sequence
ctggctggaggaa

SEQ ID NO: 13854 - DNA, 13 bp, Artificial Sequence
  synthetic sequence
aacggcgcattta

SEQ ID NO: 13855 - DNA, 13 bp, Artificial Sequence
  synthetic sequence
catttcgccaaac

SEQ ID NO: 13856 - DNA, 13 bp, Artificial Sequence
  synthetic sequence
gcagaacaaccag

SEQ ID NO: 13857 - DNA, 13 bp, Artificial Sequence
  synthetic sequence
tacaggcacagac

SEQ ID NO: 13858 - DNA, 13 bp, Artificial Sequence
  synthetic sequence
tcgtggcgtaaaa

SEQ ID NO: 13859 - DNA, 13 bp, Artificial Sequence
  synthetic sequence
atgcaacaacgac

SEQ ID NO: 13860 - DNA, 13 bp, Artificial Sequence
  synthetic sequence
tgctgctggactt

SEQ ID NO: 13861 - DNA, 13 bp, Artificial Sequence
  synthetic sequence
tcccgattgctga

SEQ ID NO: 13862 - DNA, 13 bp, Artificial Sequence
  synthetic sequence
ctattacagaaaa

SEQ ID NO: 13863 - DNA, 13 bp, Artificial Sequence
  synthetic sequence
tctaccgttccta

SEQ ID NO: 13864 - DNA, 13 bp, Artificial Sequence
  synthetic sequence
gacgtgcagaacc

SEQ ID NO: 13865 - DNA, 13 bp, Artificial Sequence
  synthetic sequence
acgatccggtgac

SEQ ID NO: 13866 - DNA, 13 bp, Artificial Sequence
  synthetic sequence
accatcgcgatac

SEQ ID NO: 13867 - DNA, 13 bp, Artificial Sequence
  synthetic sequence
gtaaagcggtcca

SEQ ID NO: 13868 - DNA, 13 bp, Artificial Sequence
  synthetic sequence
atcggcatcctgg

SEQ ID NO: 13869 - DNA, 13 bp, Artificial Sequence
  synthetic sequence
gccagatattttg

SEQ ID NO: 13870 - DNA, 13 bp, Artificial Sequence
  synthetic sequence
acaacaagatgga

SEQ ID NO: 13871 - DNA, 13 bp, Artificial Sequence
  synthetic sequence
ggaactcgttctg

SEQ ID NO: 13872 - DNA, 13 bp, Artificial Sequence
  synthetic sequence
ggcttgacagatg

SEQ ID NO: 13873 - DNA, 13 bp, Artificial Sequence
  synthetic sequence
actggcgatagat

SEQ ID NO: 13874 - DNA, 13 bp, Artificial Sequence
  synthetic sequence
attgttagctgac

SEQ ID NO: 13875 - DNA, 13 bp, Artificial Sequence
  synthetic sequence
tgaacacaaacca

SEQ ID NO: 13876 - DNA, 13 bp, Artificial Sequence
  synthetic sequence
agatctgcatcgt

SEQ ID NO: 13877 - DNA, 13 bp, Artificial Sequence
  synthetic sequence
ttgatctgggcat

SEQ ID NO: 13878 - DNA, 13 bp, Artificial Sequence
  synthetic sequence
cagggcttgagca

SEQ ID NO: 13879 - DNA, 13 bp, Artificial Sequence
  synthetic sequence
tttgtatctccaa

SEQ ID NO: 13880 - DNA, 13 bp, Artificial Sequence
  synthetic sequence
ggggctttgtagg

SEQ ID NO: 13881 - DNA, 13 bp, Artificial Sequence
  synthetic sequence
ccaaaacggaacg

SEQ ID NO: 13882 - DNA, 13 bp, Artificial Sequence
  synthetic sequence
ttatccgtgatta

SEQ ID NO: 13883 - DNA, 13 bp, Artificial Sequence
  synthetic sequence
tcagcgccggtct

SEQ ID NO: 13884 - DNA, 13 bp, Artificial Sequence
  synthetic sequence
agaaaagctgaaa

SEQ ID NO: 13885 - DNA, 13 bp, Artificial Sequence
  synthetic sequence
agcagttcggacg

SEQ ID NO: 13886 - DNA, 13 bp, Artificial Sequence
  synthetic sequence
tgctgctggcgat

SEQ ID NO: 13887 - DNA, 13 bp, Artificial Sequence
  synthetic sequence
caccgactaccgg

SEQ ID NO: 13888 - DNA, 13 bp, Artificial Sequence
  synthetic sequence
ttgatacgcttat

SEQ ID NO: 13889 - DNA, 13 bp, Artificial Sequence
  synthetic sequence
cgatcttcgcgag

SEQ ID NO: 13890 - DNA, 13 bp, Artificial Sequence
  synthetic sequence
tattctgcgccat

SEQ ID NO: 13891 - DNA, 13 bp, Artificial Sequence
  synthetic sequence
atggaggcggata

SEQ ID NO: 13892 - DNA, 13 bp, Artificial Sequence
  synthetic sequence
tatggctcagtgc

SEQ ID NO: 13893 - DNA, 13 bp, Artificial Sequence
  synthetic sequence
ttattaatgccgt

SEQ ID NO: 13894 - DNA, 13 bp, Artificial Sequence
  synthetic sequence
gtttactaggaat

SEQ ID NO: 13895 - DNA, 13 bp, Artificial Sequence
  synthetic sequence
ccagagaataaca

SEQ ID NO: 13896 - DNA, 13 bp, Artificial Sequence
  synthetic sequence
gtcctcgggcttg

SEQ ID NO: 13897 - DNA, 13 bp, Artificial Sequence
  synthetic sequence
atgagcgataaaa

SEQ ID NO: 13898 - DNA, 13 bp, Artificial Sequence
  synthetic sequence
taccgtgcgattg

SEQ ID NO: 13899 - DNA, 13 bp, Artificial Sequence
  synthetic sequence
gcacctcgatatg

SEQ ID NO: 13900 - DNA, 13 bp, Artificial Sequence
  synthetic sequence
gctgctctttgtt

SEQ ID NO: 13901 - DNA, 13 bp, Artificial Sequence
  synthetic sequence
gcagcggccatta

SEQ ID NO: 13902 - DNA, 13 bp, Artificial Sequence
  synthetic sequence
ccggcggtggtat

SEQ ID NO: 13903 - DNA, 13 bp, Artificial Sequence
  synthetic sequence
cagaaaatcctga

SEQ ID NO: 13904 - DNA, 13 bp, Artificial Sequence
  synthetic sequence
caggtgcagaata

SEQ ID NO: 13905 - DNA, 13 bp, Artificial Sequence
  synthetic sequence
gcgtcttgaaaac

SEQ ID NO: 13906 - DNA, 13 bp, Artificial Sequence
  synthetic sequence
tctatgccgttat

SEQ ID NO: 13907 - DNA, 13 bp, Artificial Sequence
  synthetic sequence
cgtcaccggaact

SEQ ID NO: 13908 - DNA, 13 bp, Artificial Sequence
  synthetic sequence
aagcgggtggaag

SEQ ID NO: 13909 - DNA, 13 bp, Artificial Sequence
  synthetic sequence
gccctgctgatcg

SEQ ID NO: 13910 - DNA, 13 bp, Artificial Sequence
  synthetic sequence
ggttaagcttatc

SEQ ID NO: 13911 - DNA, 13 bp, Artificial Sequence
  synthetic sequence
tatgtacttttgc

SEQ ID NO: 13912 - DNA, 13 bp, Artificial Sequence
  synthetic sequence
aacaattctgttc

SEQ ID NO: 13913 - DNA, 13 bp, Artificial Sequence
  synthetic sequence
ccgaaccttatct

SEQ ID NO: 13914 - DNA, 13 bp, Artificial Sequence
  synthetic sequence
aaatcaatcccct

SEQ ID NO: 13915 - DNA, 13 bp, Artificial Sequence
  synthetic sequence
catttattaggct

SEQ ID NO: 13916 - DNA, 13 bp, Artificial Sequence
  synthetic sequence
tacgcgagatgat

SEQ ID NO: 13917 - DNA, 13 bp, Artificial Sequence
  synthetic sequence
gaaacgtcttgct

SEQ ID NO: 13918 - DNA, 13 bp, Artificial Sequence
  synthetic sequence
ggtctgcttgagc

SEQ ID NO: 13919 - DNA, 13 bp, Artificial Sequence
  synthetic sequence
accagcacgacca

SEQ ID NO: 13920 - DNA, 13 bp, Artificial Sequence
  synthetic sequence
ctgacgataggtc

SEQ ID NO: 13921 - DNA, 13 bp, Artificial Sequence
  synthetic sequence
ctgaaataaacag

SEQ ID NO: 13922 - DNA, 13 bp, Artificial Sequence
  synthetic sequence
gatacattcgtcc

SEQ ID NO: 13923 - DNA, 13 bp, Artificial Sequence
  synthetic sequence
cttattgaggctt

SEQ ID NO: 13924 - DNA, 13 bp, Artificial Sequence
  synthetic sequence
tcgacgcgatcgc

SEQ ID NO: 13925 - DNA, 13 bp, Artificial Sequence
  synthetic sequence
agcctagggttgc

SEQ ID NO: 13926 - DNA, 13 bp, Artificial Sequence
  synthetic sequence
gcgtgttttcggc

SEQ ID NO: 13927 - DNA, 13 bp, Artificial Sequence
  synthetic sequence
gatttgttatctt

SEQ ID NO: 13928 - DNA, 13 bp, Artificial Sequence
  synthetic sequence
gaaattcttgcaa

SEQ ID NO: 13929 - DNA, 13 bp, Artificial Sequence
  synthetic sequence
gagcggcgcaata

SEQ ID NO: 13930 - DNA, 13 bp, Artificial Sequence
  synthetic sequence
cgttgccgtgctt

SEQ ID NO: 13931 - DNA, 13 bp, Artificial Sequence
  synthetic sequence
taccaatacgacc

SEQ ID NO: 13932 - DNA, 13 bp, Artificial Sequence
  synthetic sequence
acctaaatttatc

SEQ ID NO: 13933 - DNA, 13 bp, Artificial Sequence
  synthetic sequence
ctttccggccacc

SEQ ID NO: 13934 - DNA, 13 bp, Artificial Sequence
  synthetic sequence
ttttgctcgcccg

SEQ ID NO: 13935 - DNA, 13 bp, Artificial Sequence
  synthetic sequence
cagtactttaaaa

SEQ ID NO: 13936 - DNA, 13 bp, Artificial Sequence
  synthetic sequence
gcattgatgtact

SEQ ID NO: 13937 - DNA, 13 bp, Artificial Sequence
  synthetic sequence
aatttacgacaca

SEQ ID NO: 13938 - DNA, 13 bp, Artificial Sequence
  synthetic sequence
cgcagtggatggc

SEQ ID NO: 13939 - DNA, 13 bp, Artificial Sequence
  synthetic sequence
gcaccggcaatcg

SEQ ID NO: 13940 - DNA, 13 bp, Artificial Sequence
  synthetic sequence
tcgatgcacggct

SEQ ID NO: 13941 - DNA, 13 bp, Artificial Sequence
  synthetic sequence
cgtagatcagcag

SEQ ID NO: 13942 - DNA, 13 bp, Artificial Sequence
  synthetic sequence
tattagatgccat

SEQ ID NO: 13943 - DNA, 13 bp, Artificial Sequence
  synthetic sequence
cagcacaggcaag

SEQ ID NO: 13944 - DNA, 13 bp, Artificial Sequence
  synthetic sequence
atgagtggctaaa

SEQ ID NO: 13945 - DNA, 13 bp, Artificial Sequence
  synthetic sequence
ttggccagcagtt

SEQ ID NO: 13946 - DNA, 13 bp, Artificial Sequence
  synthetic sequence
gccaggatttctc

SEQ ID NO: 13947 - DNA, 13 bp, Artificial Sequence
  synthetic sequence
ccggtattaccct

SEQ ID NO: 13948 - DNA, 13 bp, Artificial Sequence
  synthetic sequence
tcaatattggaat

SEQ ID NO: 13949 - DNA, 13 bp, Artificial Sequence
  synthetic sequence
cgacctgacccag

SEQ ID NO: 13950 - DNA, 13 bp, Artificial Sequence
  synthetic sequence
caaaaggatacgt

SEQ ID NO: 13951 - DNA, 13 bp, Artificial Sequence
  synthetic sequence
caatgagtgtcat

SEQ ID NO: 13952 - DNA, 13 bp, Artificial Sequence
  synthetic sequence
tgtgggttgtcgc

SEQ ID NO: 13953 - DNA, 13 bp, Artificial Sequence
  synthetic sequence
ctagtatcccaag

SEQ ID NO: 13954 - DNA, 13 bp, Artificial Sequence
  synthetic sequence
gccgcgtttctcg

SEQ ID NO: 13955 - DNA, 13 bp, Artificial Sequence
  synthetic sequence
gagaacatagcgt

SEQ ID NO: 13956 - DNA, 13 bp, Artificial Sequence
  synthetic sequence
tggcagattggtt

SEQ ID NO: 13957 - DNA, 13 bp, Artificial Sequence
  synthetic sequence
catggagaacgac

SEQ ID NO: 13958 - DNA, 13 bp, Artificial Sequence
  synthetic sequence
caatgtatgtaaa

SEQ ID NO: 13959 - DNA, 13 bp, Artificial Sequence
  synthetic sequence
ctcgtcaagcagg

SEQ ID NO: 13960 - DNA, 13 bp, Artificial Sequence
  synthetic sequence
atcaacggcgcaa

SEQ ID NO: 13961 - DNA, 13 bp, Artificial Sequence
  synthetic sequence
tgtcgaggatgat

SEQ ID NO: 13962 - DNA, 13 bp, Artificial Sequence
  synthetic sequence
taccggtgcgact

SEQ ID NO: 13963 - DNA, 13 bp, Artificial Sequence
  synthetic sequence
ttaggttgggatc

SEQ ID NO: 13964 - DNA, 13 bp, Artificial Sequence
  synthetic sequence
tcgcccttcttca

SEQ ID NO: 13965 - DNA, 13 bp, Artificial Sequence
  synthetic sequence
ctttgatgattgt

SEQ ID NO: 13966 - DNA, 13 bp, Artificial Sequence
  synthetic sequence
ggcaaaattaatc

SEQ ID NO: 13967 - DNA, 13 bp, Artificial Sequence
  synthetic sequence
tcagtgaggcacc

SEQ ID NO: 13968 - DNA, 13 bp, Artificial Sequence
  synthetic sequence
tttcctcagccgt

SEQ ID NO: 13969 - DNA, 13 bp, Artificial Sequence
  synthetic sequence
tcgatatcaaagt

SEQ ID NO: 13970 - DNA, 13 bp, Artificial Sequence
  synthetic sequence
agtactcaccagt

SEQ ID NO: 13971 - DNA, 13 bp, Artificial Sequence
  synthetic sequence
tctttatagatcg

SEQ ID NO: 13972 - DNA, 13 bp, Artificial Sequence
  synthetic sequence
gatcaggccgatc

SEQ ID NO: 13973 - DNA, 13 bp, Artificial Sequence
  synthetic sequence
tgaaaatgaggat

SEQ ID NO: 13974 - DNA, 13 bp, Artificial Sequence
  synthetic sequence
cagtcgtacgttg

SEQ ID NO: 13975 - DNA, 13 bp, Artificial Sequence
  synthetic sequence
aaggaccgcttct

SEQ ID NO: 13976 - DNA, 13 bp, Artificial Sequence
  synthetic sequence
cgatagatggcaa

SEQ ID NO: 13977 - DNA, 13 bp, Artificial Sequence
  synthetic sequence
gtttactaaacgg

SEQ ID NO: 13978 - DNA, 13 bp, Artificial Sequence
  synthetic sequence
tccgatcagatgc

SEQ ID NO: 13979 - DNA, 13 bp, Artificial Sequence
  synthetic sequence
gtagccctcaagt

SEQ ID NO: 13980 - DNA, 13 bp, Artificial Sequence
  synthetic sequence
tttgccgaactct

SEQ ID NO: 13981 - DNA, 13 bp, Artificial Sequence
  synthetic sequence
agcaactggtgca

SEQ ID NO: 13982 - DNA, 13 bp, Artificial Sequence
  synthetic sequence
aaaccgagagaaa

SEQ ID NO: 13983 - DNA, 13 bp, Artificial Sequence
  synthetic sequence
tatgacccgaatg

SEQ ID NO: 13984 - DNA, 13 bp, Artificial Sequence
  synthetic sequence
caaaatggcatgg

SEQ ID NO: 13985 - DNA, 13 bp, Artificial Sequence
  synthetic sequence
attattccaaact

SEQ ID NO: 13986 - DNA, 13 bp, Artificial Sequence
  synthetic sequence
acatcagccgcgg

SEQ ID NO: 13987 - DNA, 13 bp, Artificial Sequence
  synthetic sequence
cgatcgcagcttc

SEQ ID NO: 13988 - DNA, 13 bp, Artificial Sequence
  synthetic sequence
tgggattggtatt

SEQ ID NO: 13989 - DNA, 13 bp, Artificial Sequence
  synthetic sequence
ctatgcgctttaa

SEQ ID NO: 13990 - DNA, 13 bp, Artificial Sequence
  synthetic sequence
atttaggtgtggg

SEQ ID NO: 13991 - DNA, 13 bp, Artificial Sequence
  synthetic sequence
tggccggcatcac

SEQ ID NO: 13992 - DNA, 13 bp, Artificial Sequence
  synthetic sequence
cagaataaaggcg

SEQ ID NO: 13993 - DNA, 13 bp, Artificial Sequence
  synthetic sequence
cttctacctgcag

SEQ ID NO: 13994 - DNA, 13 bp, Artificial Sequence
  synthetic sequence
ttttcacgaacgg

SEQ ID NO: 13995 - DNA, 13 bp, Artificial Sequence
  synthetic sequence
tgcgccatcacgc

SEQ ID NO: 13996 - DNA, 13 bp, Artificial Sequence
  synthetic sequence
acgttgggatgac

SEQ ID NO: 13997 - DNA, 13 bp, Artificial Sequence
  synthetic sequence
tctccctgttagc

SEQ ID NO: 13998 - DNA, 13 bp, Artificial Sequence
  synthetic sequence
ctgaaaacagcca

SEQ ID NO: 13999 - DNA, 13 bp, Artificial Sequence
  synthetic sequence
atgtggcctcaca

SEQ ID NO: 14000 - DNA, 13 bp, Artificial Sequence
  synthetic sequence
cgccagcacggta

SEQ ID NO: 14001 - DNA, 13 bp, Artificial Sequence
  synthetic sequence
acttcagcatggt

SEQ ID NO: 14002 - DNA, 13 bp, Artificial Sequence
  synthetic sequence
aaagaagatggta

SEQ ID NO: 14003 - DNA, 13 bp, Artificial Sequence
  synthetic sequence
gatttcatcattt

SEQ ID NO: 14004 - DNA, 13 bp, Artificial Sequence
  synthetic sequence
ttgcgagggtaaa

SEQ ID NO: 14005 - DNA, 13 bp, Artificial Sequence
  synthetic sequence
cgggcttgtcgaa

SEQ ID NO: 14006 - DNA, 13 bp, Artificial Sequence
  synthetic sequence
accgacgtggtca

SEQ ID NO: 14007 - DNA, 13 bp, Artificial Sequence
  synthetic sequence
accggagctgtag

SEQ ID NO: 14008 - DNA, 13 bp, Artificial Sequence
  synthetic sequence
ggaaggataatct

SEQ ID NO: 14009 - DNA, 13 bp, Artificial Sequence
  synthetic sequence
cgctggatgcgca

SEQ ID NO: 14010 - DNA, 13 bp, Artificial Sequence
  synthetic sequence
gtattgcgccatg

SEQ ID NO: 14011 - DNA, 13 bp, Artificial Sequence
  synthetic sequence
ctctcgctggatt

SEQ ID NO: 14012 - DNA, 13 bp, Artificial Sequence
  synthetic sequence
atcgcctgcacct

SEQ ID NO: 14013 - DNA, 13 bp, Artificial Sequence
  synthetic sequence
tccgcatttatct

SEQ ID NO: 14014 - DNA, 13 bp, Artificial Sequence
  synthetic sequence
aagtatcatgtgg

SEQ ID NO: 14015 - DNA, 13 bp, Artificial Sequence
  synthetic sequence
accgcttgcggct

SEQ ID NO: 14016 - DNA, 13 bp, Artificial Sequence
  synthetic sequence
acgatacgtcata

SEQ ID NO: 14017 - DNA, 13 bp, Artificial Sequence
  synthetic sequence
ttatcacacatca

SEQ ID NO: 14018 - DNA, 13 bp, Artificial Sequence
  synthetic sequence
tacatcgaactgg

SEQ ID NO: 14019 - DNA, 13 bp, Artificial Sequence
  synthetic sequence
ctgaatttgctta

SEQ ID NO: 14020 - DNA, 13 bp, Artificial Sequence
  synthetic sequence
tgcccttcaccgc

SEQ ID NO: 14021 - DNA, 13 bp, Artificial Sequence
  synthetic sequence
tcctgttcaggaa

SEQ ID NO: 14022 - DNA, 13 bp, Artificial Sequence
  synthetic sequence
gatcacgaaaggg

SEQ ID NO: 14023 - DNA, 13 bp, Artificial Sequence
  synthetic sequence
atgctggcgcacg

SEQ ID NO: 14024 - DNA, 13 bp, Artificial Sequence
  synthetic sequence
ttaagaaatccaa

SEQ ID NO: 14025 - DNA, 13 bp, Artificial Sequence
  synthetic sequence
agtatatcgcagg

SEQ ID NO: 14026 - DNA, 13 bp, Artificial Sequence
  synthetic sequence
atcggcttcggcg

SEQ ID NO: 14027 - DNA, 13 bp, Artificial Sequence
  synthetic sequence
agctatccttccg

SEQ ID NO: 14028 - DNA, 13 bp, Artificial Sequence
  synthetic sequence
atcacttgggatg

SEQ ID NO: 14029 - DNA, 13 bp, Artificial Sequence
  synthetic sequence
actcgctcgcgat

SEQ ID NO: 14030 - DNA, 13 bp, Artificial Sequence
  synthetic sequence
catttccgccatg

SEQ ID NO: 14031 - DNA, 13 bp, Artificial Sequence
  synthetic sequence
acgttcagaccaa

SEQ ID NO: 14032 - DNA, 13 bp, Artificial Sequence
  synthetic sequence
cgaacagaccgat

SEQ ID NO: 14033 - DNA, 13 bp, Artificial Sequence
  synthetic sequence
aaaccggctaatg

SEQ ID NO: 14034 - DNA, 13 bp, Artificial Sequence
  synthetic sequence
tgatctcgccttt

SEQ ID NO: 14035 - DNA, 13 bp, Artificial Sequence
  synthetic sequence
cgaccgcctgttc

SEQ ID NO: 14036 - DNA, 13 bp, Artificial Sequence
  synthetic sequence
atgattggcttaa

SEQ ID NO: 14037 - DNA, 13 bp, Artificial Sequence
  synthetic sequence
aaagatggcaaag

SEQ ID NO: 14038 - DNA, 13 bp, Artificial Sequence
  synthetic sequence
agcgcctgggtct

SEQ ID NO: 14039 - DNA, 13 bp, Artificial Sequence
  synthetic sequence
tcatcatgccggt

SEQ ID NO: 14040 - DNA, 13 bp, Artificial Sequence
  synthetic sequence
tttcttcggcgcc

SEQ ID NO: 14041 - DNA, 13 bp, Artificial Sequence
  synthetic sequence
ataacttgcacaa

SEQ ID NO: 14042 - DNA, 13 bp, Artificial Sequence
  synthetic sequence
caggttacggaca

SEQ ID NO: 14043 - DNA, 13 bp, Artificial Sequence
  synthetic sequence
tcccgatggggag

SEQ ID NO: 14044 - DNA, 13 bp, Artificial Sequence
  synthetic sequence
gctggaagctcta

SEQ ID NO: 14045 - DNA, 13 bp, Artificial Sequence
  synthetic sequence
gcgccaaaggcga

SEQ ID NO: 14046 - DNA, 13 bp, Artificial Sequence
  synthetic sequence
gctgtatgcggag

SEQ ID NO: 14047 - DNA, 13 bp, Artificial Sequence
  synthetic sequence
ccttattttaccc

SEQ ID NO: 14048 - DNA, 13 bp, Artificial Sequence
  synthetic sequence
tggtttgttctga

SEQ ID NO: 14049 - DNA, 13 bp, Artificial Sequence
  synthetic sequence
ccgccgtagacca

SEQ ID NO: 14050 - DNA, 13 bp, Artificial Sequence
  synthetic sequence
ttgccagagtgaa

SEQ ID NO: 14051 - DNA, 13 bp, Artificial Sequence
  synthetic sequence
ggtaaacagcgtg

SEQ ID NO: 14052 - DNA, 13 bp, Artificial Sequence
  synthetic sequence
gcattattcagtt

SEQ ID NO: 14053 - DNA, 13 bp, Artificial Sequence
  synthetic sequence
cgctgcgcgtatt

SEQ ID NO: 14054 - DNA, 13 bp, Artificial Sequence
  synthetic sequence
agatggaggtgct

SEQ ID NO: 14055 - DNA, 13 bp, Artificial Sequence
  synthetic sequence
ggcctgaattgac

SEQ ID NO: 14056 - DNA, 13 bp, Artificial Sequence
  synthetic sequence
ccttgtatgatcc

SEQ ID NO: 14057 - DNA, 13 bp, Artificial Sequence
  synthetic sequence
atgaccgatcgtt

SEQ ID NO: 14058 - DNA, 13 bp, Artificial Sequence
  synthetic sequence
gtagttttgccct

SEQ ID NO: 14059 - DNA, 13 bp, Artificial Sequence
  synthetic sequence
acaataaagcggt

SEQ ID NO: 14060 - DNA, 13 bp, Artificial Sequence
  synthetic sequence
ccgaaaccggcca

SEQ ID NO: 14061 - DNA, 13 bp, Artificial Sequence
  synthetic sequence
tccggcatccagc

SEQ ID NO: 14062 - DNA, 13 bp, Artificial Sequence
  synthetic sequence
tgaatgccaaggc

SEQ ID NO: 14063 - DNA, 13 bp, Artificial Sequence
  synthetic sequence
aactgcatcgcta

SEQ ID NO: 14064 - DNA, 13 bp, Artificial Sequence
  synthetic sequence
ggcttgcgcttga

SEQ ID NO: 14065 - DNA, 13 bp, Artificial Sequence
  synthetic sequence
ctgaacatatggc

SEQ ID NO: 14066 - DNA, 13 bp, Artificial Sequence
  synthetic sequence
atttctcacgcca

SEQ ID NO: 14067 - DNA, 13 bp, Artificial Sequence
  synthetic sequence
catcggcattacc

SEQ ID NO: 14068 - DNA, 13 bp, Artificial Sequence
  synthetic sequence
cagatgctacgtg

SEQ ID NO: 14069 - DNA, 13 bp, Artificial Sequence
  synthetic sequence
atgtcggagctgg

SEQ ID NO: 14070 - DNA, 13 bp, Artificial Sequence
  synthetic sequence
ttgtgaacattgt

SEQ ID NO: 14071 - DNA, 13 bp, Artificial Sequence
  synthetic sequence
tttgctcttgaag

SEQ ID NO: 14072 - DNA, 13 bp, Artificial Sequence
  synthetic sequence
actggctgacgcg

SEQ ID NO: 14073 - DNA, 13 bp, Artificial Sequence
  synthetic sequence
tatttgctattac

SEQ ID NO: 14074 - DNA, 13 bp, Artificial Sequence
  synthetic sequence
atgcactcgctgc

SEQ ID NO: 14075 - DNA, 13 bp, Artificial Sequence
  synthetic sequence
cgaagggcgttgt

SEQ ID NO: 14076 - DNA, 13 bp, Artificial Sequence
  synthetic sequence
aaaggttttcatt

SEQ ID NO: 14077 - DNA, 13 bp, Artificial Sequence
  synthetic sequence
ataccgcgcaggt

SEQ ID NO: 14078 - DNA, 13 bp, Artificial Sequence
  synthetic sequence
tgttccatgaata

SEQ ID NO: 14079 - DNA, 13 bp, Artificial Sequence
  synthetic sequence
cggtaaatcgcaa

SEQ ID NO: 14080 - DNA, 13 bp, Artificial Sequence
  synthetic sequence
tgttcatcaccga

SEQ ID NO: 14081 - DNA, 13 bp, Artificial Sequence
  synthetic sequence
gggtgtggtcggt

SEQ ID NO: 14082 - DNA, 13 bp, Artificial Sequence
  synthetic sequence
gtcccttcaaagg

SEQ ID NO: 14083 - DNA, 13 bp, Artificial Sequence
  synthetic sequence
tgaaaacggctga

SEQ ID NO: 14084 - DNA, 13 bp, Artificial Sequence
  synthetic sequence
cggggatccacat

SEQ ID NO: 14085 - DNA, 13 bp, Artificial Sequence
  synthetic sequence
ctgaggatggcgt

SEQ ID NO: 14086 - DNA, 13 bp, Artificial Sequence
  synthetic sequence
caaaggccatcgg

SEQ ID NO: 14087 - DNA, 13 bp, Artificial Sequence
  synthetic sequence
cggtttctcttcc

SEQ ID NO: 14088 - DNA, 13 bp, Artificial Sequence
  synthetic sequence
atcggcctgaact

SEQ ID NO: 14089 - DNA, 13 bp, Artificial Sequence
  synthetic sequence
gaggaagttgtac

SEQ ID NO: 14090 - DNA, 13 bp, Artificial Sequence
  synthetic sequence
tgaaagtatcatt

SEQ ID NO: 14091 - DNA, 13 bp, Artificial Sequence
  synthetic sequence
ctgactaaactgc

SEQ ID NO: 14092 - DNA, 13 bp, Artificial Sequence
  synthetic sequence
ttataaaagctgt

SEQ ID NO: 14093 - DNA, 13 bp, Artificial Sequence
  synthetic sequence
accacacctatgt

SEQ ID NO: 14094 - DNA, 13 bp, Artificial Sequence
  synthetic sequence
atcaagtcagcca

SEQ ID NO: 14095 - DNA, 13 bp, Artificial Sequence
  synthetic sequence
cgcctgcgctttt

SEQ ID NO: 14096 - DNA, 13 bp, Artificial Sequence
  synthetic sequence
cgaaagcccaggc

SEQ ID NO: 14097 - DNA, 13 bp, Artificial Sequence
  synthetic sequence
gaacaagaggaaa

SEQ ID NO: 14098 - DNA, 13 bp, Artificial Sequence
  synthetic sequence
atcagtcacgcgt

SEQ ID NO: 14099 - DNA, 13 bp, Artificial Sequence
  synthetic sequence
ctggtgagcatgg

SEQ ID NO: 14100 - DNA, 13 bp, Artificial Sequence
  synthetic sequence
gaagcccagctgc

SEQ ID NO: 14101 - DNA, 13 bp, Artificial Sequence
  synthetic sequence
ttctcgcggtcga

SEQ ID NO: 14102 - DNA, 13 bp, Artificial Sequence
  synthetic sequence
tgatcgagcgcgc

SEQ ID NO: 14103 - DNA, 13 bp, Artificial Sequence
  synthetic sequence
acggcggacaaca

SEQ ID NO: 14104 - DNA, 13 bp, Artificial Sequence
  synthetic sequence
cttcaatgcctgt

SEQ ID NO: 14105 - DNA, 13 bp, Artificial Sequence
  synthetic sequence
aacagatccctgt

SEQ ID NO: 14106 - DNA, 13 bp, Artificial Sequence
  synthetic sequence
tcacgctcgtcgt

SEQ ID NO: 14107 - DNA, 13 bp, Artificial Sequence
  synthetic sequence
aaacattagacga

SEQ ID NO: 14108 - DNA, 13 bp, Artificial Sequence
  synthetic sequence
agcgcctggacga

SEQ ID NO: 14109 - DNA, 13 bp, Artificial Sequence
  synthetic sequence
cagtacaacttcc

SEQ ID NO: 14110 - DNA, 13 bp, Artificial Sequence
  synthetic sequence
tttgctgccgctg

SEQ ID NO: 14111 - DNA, 13 bp, Artificial Sequence
  synthetic sequence
ggcatcgccagca

SEQ ID NO: 14112 - DNA, 13 bp, Artificial Sequence
  synthetic sequence
tgaagccgttgat

SEQ ID NO: 14113 - DNA, 13 bp, Artificial Sequence
  synthetic sequence
gtacaagcacaaa

SEQ ID NO: 14114 - DNA, 13 bp, Artificial Sequence
  synthetic sequence
gaaaagagtattt

SEQ ID NO: 14115 - DNA, 13 bp, Artificial Sequence
  synthetic sequence
tactgggtgatgt

SEQ ID NO: 14116 - DNA, 13 bp, Artificial Sequence
  synthetic sequence
tgtcgttctgtcc

SEQ ID NO: 14117 - DNA, 13 bp, Artificial Sequence
  synthetic sequence
attcttgcggcta

SEQ ID NO: 14118 - DNA, 13 bp, Artificial Sequence
  synthetic sequence
aatccttgcgcgc

SEQ ID NO: 14119 - DNA, 13 bp, Artificial Sequence
  synthetic sequence
cgatgggcatcat

SEQ ID NO: 14120 - DNA, 13 bp, Artificial Sequence
  synthetic sequence
atggcgtaatcgg

SEQ ID NO: 14121 - DNA, 13 bp, Artificial Sequence
  synthetic sequence
ataattcccatat

SEQ ID NO: 14122 - DNA, 13 bp, Artificial Sequence
  synthetic sequence
tggccgaactcaa

SEQ ID NO: 14123 - DNA, 13 bp, Artificial Sequence
  synthetic sequence
agcaaaagtacat

SEQ ID NO: 14124 - DNA, 13 bp, Artificial Sequence
  synthetic sequence
aatcctttagaag

SEQ ID NO: 14125 - DNA, 13 bp, Artificial Sequence
  synthetic sequence
tgcgccgcacttc

SEQ ID NO: 14126 - DNA, 13 bp, Artificial Sequence
  synthetic sequence
ggcggtggatgtt

SEQ ID NO: 14127 - DNA, 13 bp, Artificial Sequence
  synthetic sequence
tggttggcgtgcg

SEQ ID NO: 14128 - DNA, 13 bp, Artificial Sequence
  synthetic sequence
acgatcggcccag

SEQ ID NO: 14129 - DNA, 13 bp, Artificial Sequence
  synthetic sequence
agtcgtgccgcat

SEQ ID NO: 14130 - DNA, 13 bp, Artificial Sequence
  synthetic sequence
gtcattggcaatg

SEQ ID NO: 14131 - DNA, 13 bp, Artificial Sequence
  synthetic sequence
ttggaataaacgc

SEQ ID NO: 14132 - DNA, 13 bp, Artificial Sequence
  synthetic sequence
tagaaagccatac

SEQ ID NO: 14133 - DNA, 13 bp, Artificial Sequence
  synthetic sequence
gcgaccgaaattg

SEQ ID NO: 14134 - DNA, 13 bp, Artificial Sequence
  synthetic sequence
ggtactttgcagg

SEQ ID NO: 14135 - DNA, 13 bp, Artificial Sequence
  synthetic sequence
tgtggaacgccgg

SEQ ID NO: 14136 - DNA, 13 bp, Artificial Sequence
  synthetic sequence
acgtactgaccct

SEQ ID NO: 14137 - DNA, 13 bp, Artificial Sequence
  synthetic sequence
cgctgttgctgtt

SEQ ID NO: 14138 - DNA, 13 bp, Artificial Sequence
  synthetic sequence
caccacgtctgga

SEQ ID NO: 14139 - DNA, 13 bp, Artificial Sequence
  synthetic sequence
catcagcgcctgc

SEQ ID NO: 14140 - DNA, 13 bp, Artificial Sequence
  synthetic sequence
gcttgtggtggca

SEQ ID NO: 14141 - DNA, 13 bp, Artificial Sequence
  synthetic sequence
cgctcgacgttct

SEQ ID NO: 14142 - DNA, 13 bp, Artificial Sequence
  synthetic sequence
cttcttcagtcag

SEQ ID NO: 14143 - DNA, 13 bp, Artificial Sequence
  synthetic sequence
tacagaacaacca

SEQ ID NO: 14144 - DNA, 13 bp, Artificial Sequence
  synthetic sequence
ttgaaaccgttga

SEQ ID NO: 14145 - DNA, 13 bp, Artificial Sequence
  synthetic sequence
tgtctgaaacctc

SEQ ID NO: 14146 - DNA, 13 bp, Artificial Sequence
  synthetic sequence
atttattcaagga

SEQ ID NO: 14147 - DNA, 13 bp, Artificial Sequence
  synthetic sequence
ctattgctaatga

SEQ ID NO: 14148 - DNA, 13 bp, Artificial Sequence
  synthetic sequence
gtcagctcctgct

SEQ ID NO: 14149 - DNA, 13 bp, Artificial Sequence
  synthetic sequence
ataaagataatgg

SEQ ID NO: 14150 - DNA, 13 bp, Artificial Sequence
  synthetic sequence
acataccatcagt

SEQ ID NO: 14151 - DNA, 13 bp, Artificial Sequence
  synthetic sequence
acggcagcgcaaa

SEQ ID NO: 14152 - DNA, 13 bp, Artificial Sequence
  synthetic sequence
tccagaaaatcca

SEQ ID NO: 14153 - DNA, 13 bp, Artificial Sequence
  synthetic sequence
atctttggtaaat

SEQ ID NO: 14154 - DNA, 13 bp, Artificial Sequence
  synthetic sequence
cgtttcataaaga

SEQ ID NO: 14155 - DNA, 13 bp, Artificial Sequence
  synthetic sequence
catgaccaggcac

SEQ ID NO: 14156 - DNA, 13 bp, Artificial Sequence
  synthetic sequence
caaaatatctggc

SEQ ID NO: 14157 - DNA, 13 bp, Artificial Sequence
  synthetic sequence
atcggcaatctgc

SEQ ID NO: 14158 - DNA, 13 bp, Artificial Sequence
  synthetic sequence
aggagctaaccgc

SEQ ID NO: 14159 - DNA, 13 bp, Artificial Sequence
  synthetic sequence
gacatatcccaag

SEQ ID NO: 14160 - DNA, 13 bp, Artificial Sequence
  synthetic sequence
ttgatgttggtat

SEQ ID NO: 14161 - DNA, 13 bp, Artificial Sequence
  synthetic sequence
gcagaacgtgcag

SEQ ID NO: 14162 - DNA, 13 bp, Artificial Sequence
  synthetic sequence
agaaggccgcgca

SEQ ID NO: 14163 - DNA, 13 bp, Artificial Sequence
  synthetic sequence
aggatgtttatac

SEQ ID NO: 14164 - DNA, 13 bp, Artificial Sequence
  synthetic sequence
cagcaccatcgcc

SEQ ID NO: 14165 - DNA, 13 bp, Artificial Sequence
  synthetic sequence
cgtaccgaccgag

SEQ ID NO: 14166 - DNA, 13 bp, Artificial Sequence
  synthetic sequence
tttaagtgatttc

SEQ ID NO: 14167 - DNA, 13 bp, Artificial Sequence
  synthetic sequence
tataattgtcatg

SEQ ID NO: 14168 - DNA, 13 bp, Artificial Sequence
  synthetic sequence
gggtcatgtttgc

SEQ ID NO: 14169 - DNA, 13 bp, Artificial Sequence
  synthetic sequence
tggcgcgctgtta

SEQ ID NO: 14170 - DNA, 13 bp, Artificial Sequence
  synthetic sequence
tatggttcgccac

SEQ ID NO: 14171 - DNA, 13 bp, Artificial Sequence
  synthetic sequence
accgctgccgcta

SEQ ID NO: 14172 - DNA, 13 bp, Artificial Sequence
  synthetic sequence
ggagcacgcgttg

SEQ ID NO: 14173 - DNA, 13 bp, Artificial Sequence
  synthetic sequence
atgatggaaggcc

SEQ ID NO: 14174 - DNA, 13 bp, Artificial Sequence
  synthetic sequence
gttgatgtcggcc

SEQ ID NO: 14175 - DNA, 13 bp, Artificial Sequence
  synthetic sequence
ccgtcttcagccg

SEQ ID NO: 14176 - DNA, 13 bp, Artificial Sequence
  synthetic sequence
tttctttgctagt

SEQ ID NO: 14177 - DNA, 13 bp, Artificial Sequence
  synthetic sequence
tgctggccatggt

SEQ ID NO: 14178 - DNA, 13 bp, Artificial Sequence
  synthetic sequence
aatgcaacaatag

SEQ ID NO: 14179 - DNA, 13 bp, Artificial Sequence
  synthetic sequence
cagctgtttccca

SEQ ID NO: 14180 - DNA, 13 bp, Artificial Sequence
  synthetic sequence
agcgtcacgccga

SEQ ID NO: 14181 - DNA, 13 bp, Artificial Sequence
  synthetic sequence
gaccttcgcactg

SEQ ID NO: 14182 - DNA, 13 bp, Artificial Sequence
  synthetic sequence
gacgttgcaggaa

SEQ ID NO: 14183 - DNA, 13 bp, Artificial Sequence
  synthetic sequence
agcagtttctcga

SEQ ID NO: 14184 - DNA, 13 bp, Artificial Sequence
  synthetic sequence
tgctgccgaacat

SEQ ID NO: 14185 - DNA, 13 bp, Artificial Sequence
  synthetic sequence
gcttctttcggcg

SEQ ID NO: 14186 - DNA, 13 bp, Artificial Sequence
  synthetic sequence
tgctggtgggcgt

SEQ ID NO: 14187 - DNA, 13 bp, Artificial Sequence
  synthetic sequence
gtactcttgcctg

SEQ ID NO: 14188 - DNA, 13 bp, Artificial Sequence
  synthetic sequence
tgctcgatctggc

SEQ ID NO: 14189 - DNA, 13 bp, Artificial Sequence
  synthetic sequence
ggcgcagaacatc

SEQ ID NO: 14190 - DNA, 13 bp, Artificial Sequence
  synthetic sequence
acgccctgttcgc

SEQ ID NO: 14191 - DNA, 13 bp, Artificial Sequence
  synthetic sequence
acctggaagaaca

SEQ ID NO: 14192 - DNA, 13 bp, Artificial Sequence
  synthetic sequence
catacatggatta

SEQ ID NO: 14193 - DNA, 13 bp, Artificial Sequence
  synthetic sequence
tggagtccgatta

SEQ ID NO: 14194 - DNA, 13 bp, Artificial Sequence
  synthetic sequence
taattgtaccaat

SEQ ID NO: 14195 - DNA, 13 bp, Artificial Sequence
  synthetic sequence
cacaatggccatg

SEQ ID NO: 14196 - DNA, 13 bp, Artificial Sequence
  synthetic sequence
aatccatgttttg

SEQ ID NO: 14197 - DNA, 13 bp, Artificial Sequence
  synthetic sequence
accatggccaagg

SEQ ID NO: 14198 - DNA, 13 bp, Artificial Sequence
  synthetic sequence
catcgtggtcgcc

SEQ ID NO: 14199 - DNA, 13 bp, Artificial Sequence
  synthetic sequence
aactactttgata

SEQ ID NO: 14200 - DNA, 13 bp, Artificial Sequence
  synthetic sequence
gattgtcattata

SEQ ID NO: 14201 - DNA, 13 bp, Artificial Sequence
  synthetic sequence
gttcgtaatagct

SEQ ID NO: 14202 - DNA, 13 bp, Artificial Sequence
  synthetic sequence
gggttgctccgag

SEQ ID NO: 14203 - DNA, 13 bp, Artificial Sequence
  synthetic sequence
aggtattctgtaa

SEQ ID NO: 14204 - DNA, 13 bp, Artificial Sequence
  synthetic sequence
cttaggaacatta

SEQ ID NO: 14205 - DNA, 13 bp, Artificial Sequence
  synthetic sequence
aggtataaatcat

SEQ ID NO: 14206 - DNA, 13 bp, Artificial Sequence
  synthetic sequence
tgagaatggtgct

SEQ ID NO: 14207 - DNA, 13 bp, Artificial Sequence
  synthetic sequence
tacttctgcttgg

SEQ ID NO: 14208 - DNA, 13 bp, Artificial Sequence
  synthetic sequence
ctggcaaccttcg

SEQ ID NO: 14209 - DNA, 13 bp, Artificial Sequence
  synthetic sequence
ttcatccttcatt

SEQ ID NO: 14210 - DNA, 13 bp, Artificial Sequence
  synthetic sequence
atttccaccaggt

SEQ ID NO: 14211 - DNA, 13 bp, Artificial Sequence
  synthetic sequence
ttcgcgaacgggc

SEQ ID NO: 14212 - DNA, 13 bp, Artificial Sequence
  synthetic sequence
agaaataatcgga

SEQ ID NO: 14213 - DNA, 13 bp, Artificial Sequence
  synthetic sequence
gccaaggcgagga

SEQ ID NO: 14214 - DNA, 13 bp, Artificial Sequence
  synthetic sequence
gtcgtaggcacgc

SEQ ID NO: 14215 - DNA, 13 bp, Artificial Sequence
  synthetic sequence
gcaatcccgtcga

SEQ ID NO: 14216 - DNA, 13 bp, Artificial Sequence
  synthetic sequence
cattgcttgaact

SEQ ID NO: 14217 - DNA, 13 bp, Artificial Sequence
  synthetic sequence
tgattgctcagca

SEQ ID NO: 14218 - DNA, 13 bp, Artificial Sequence
  synthetic sequence
aggatttagaagt

SEQ ID NO: 14219 - DNA, 13 bp, Artificial Sequence
  synthetic sequence
ttcattacatcta

SEQ ID NO: 14220 - DNA, 13 bp, Artificial Sequence
  synthetic sequence
caagcctctactg

SEQ ID NO: 14221 - DNA, 13 bp, Artificial Sequence
  synthetic sequence
cagcaggcgccta

SEQ ID NO: 14222 - DNA, 13 bp, Artificial Sequence
  synthetic sequence
tccatattgggca

SEQ ID NO: 14223 - DNA, 13 bp, Artificial Sequence
  synthetic sequence
atgttcatgccgc

SEQ ID NO: 14224 - DNA, 13 bp, Artificial Sequence
  synthetic sequence
ccaatgtggctag

SEQ ID NO: 14225 - DNA, 13 bp, Artificial Sequence
  synthetic sequence
ctttcatagtgga

SEQ ID NO: 14226 - DNA, 13 bp, Artificial Sequence
  synthetic sequence
agctgccaactgg

SEQ ID NO: 14227 - DNA, 13 bp, Artificial Sequence
  synthetic sequence
ggcggactacaaa

SEQ ID NO: 14228 - DNA, 13 bp, Artificial Sequence
  synthetic sequence
aagatcgttttcg

SEQ ID NO: 14229 - DNA, 13 bp, Artificial Sequence
  synthetic sequence
ctcgcggttgcca

SEQ ID NO: 14230 - DNA, 13 bp, Artificial Sequence
  synthetic sequence
tcacgccaccttt

SEQ ID NO: 14231 - DNA, 13 bp, Artificial Sequence
  synthetic sequence
gtctgtttggcgc

SEQ ID NO: 14232 - DNA, 13 bp, Artificial Sequence
  synthetic sequence
accatcgcgtgca

SEQ ID NO: 14233 - DNA, 13 bp, Artificial Sequence
  synthetic sequence
aagctgcgagggc

SEQ ID NO: 14234 - DNA, 13 bp, Artificial Sequence
  synthetic sequence
gtgttcgagcaaa

SEQ ID NO: 14235 - DNA, 13 bp, Artificial Sequence
  synthetic sequence
atggaatgccgga

SEQ ID NO: 14236 - DNA, 13 bp, Artificial Sequence
  synthetic sequence
aaatggcgatgat

SEQ ID NO: 14237 - DNA, 13 bp, Artificial Sequence
  synthetic sequence
accgcagagaaca

SEQ ID NO: 14238 - DNA, 13 bp, Artificial Sequence
  synthetic sequence
attcgcccagggc

SEQ ID NO: 14239 - DNA, 13 bp, Artificial Sequence
  synthetic sequence
cccgaaagctgtg

SEQ ID NO: 14240 - DNA, 13 bp, Artificial Sequence
  synthetic sequence
aaagtggttggat

SEQ ID NO: 14241 - DNA, 13 bp, Artificial Sequence
  synthetic sequence
aatggcgtgaact

SEQ ID NO: 14242 - DNA, 13 bp, Artificial Sequence
  synthetic sequence
gtcgcacacaccc

SEQ ID NO: 14243 - DNA, 13 bp, Artificial Sequence
  synthetic sequence
ttgctgttgcttt

SEQ ID NO: 14244 - DNA, 13 bp, Artificial Sequence
  synthetic sequence
gtcttcagcagtc

SEQ ID NO: 14245 - DNA, 13 bp, Artificial Sequence
  synthetic sequence
aacgctattccct

SEQ ID NO: 14246 - DNA, 13 bp, Artificial Sequence
  synthetic sequence
gaactgaagaaaa

SEQ ID NO: 14247 - DNA, 13 bp, Artificial Sequence
  synthetic sequence
gcttttaatgcca

SEQ ID NO: 14248 - DNA, 13 bp, Artificial Sequence
  synthetic sequence
gcgctgcaggaca

SEQ ID NO: 14249 - DNA, 13 bp, Artificial Sequence
  synthetic sequence
tctgacaattcct

SEQ ID NO: 14250 - DNA, 13 bp, Artificial Sequence
  synthetic sequence
gcttgatggagca

SEQ ID NO: 14251 - DNA, 13 bp, Artificial Sequence
  synthetic sequence
aagtcagacttac

SEQ ID NO: 14252 - DNA, 13 bp, Artificial Sequence
  synthetic sequence
tgacaatgcgaat

SEQ ID NO: 14253 - DNA, 13 bp, Artificial Sequence
  synthetic sequence
cgaaagattccgt

SEQ ID NO: 14254 - DNA, 13 bp, Artificial Sequence
  synthetic sequence
gtatcgcctgcag

SEQ ID NO: 14255 - DNA, 13 bp, Artificial Sequence
  synthetic sequence
gtaaaagttcgcc

SEQ ID NO: 14256 - DNA, 13 bp, Artificial Sequence
  synthetic sequence
tggccaaaccatc

SEQ ID NO: 14257 - DNA, 13 bp, Artificial Sequence
  synthetic sequence
agctggccgagct

SEQ ID NO: 14258 - DNA, 13 bp, Artificial Sequence
  synthetic sequence
cccacacctacct

SEQ ID NO: 14259 - DNA, 13 bp, Artificial Sequence
  synthetic sequence
atacaggttatgc

SEQ ID NO: 14260 - DNA, 13 bp, Artificial Sequence
  synthetic sequence
tgccattcgtgaa

SEQ ID NO: 14261 - DNA, 13 bp, Artificial Sequence
  synthetic sequence
acgtgtgcaaaca

SEQ ID NO: 14262 - DNA, 13 bp, Artificial Sequence
  synthetic sequence
tgaaatcaaactt

SEQ ID NO: 14263 - DNA, 13 bp, Artificial Sequence
  synthetic sequence
gcgatgtgattga

SEQ ID NO: 14264 - DNA, 13 bp, Artificial Sequence
  synthetic sequence
ggtagatcgccac

SEQ ID NO: 14265 - DNA, 13 bp, Artificial Sequence
  synthetic sequence
tagtagctattac

SEQ ID NO: 14266 - DNA, 13 bp, Artificial Sequence
  synthetic sequence
ttccttcattaca

SEQ ID NO: 14267 - DNA, 13 bp, Artificial Sequence
  synthetic sequence
agcttgaggggtt

SEQ ID NO: 14268 - DNA, 13 bp, Artificial Sequence
  synthetic sequence
tcggtcgacgagg

SEQ ID NO: 14269 - DNA, 13 bp, Artificial Sequence
  synthetic sequence
aaacggcgtggtg

SEQ ID NO: 14270 - DNA, 13 bp, Artificial Sequence
  synthetic sequence
attagtgcgggaa

SEQ ID NO: 14271 - DNA, 13 bp, Artificial Sequence
  synthetic sequence
ggaggctacttag

SEQ ID NO: 14272 - DNA, 13 bp, Artificial Sequence
  synthetic sequence
aattggttccaca

SEQ ID NO: 14273 - DNA, 13 bp, Artificial Sequence
  synthetic sequence
tatgatatcctct

SEQ ID NO: 14274 - DNA, 13 bp, Artificial Sequence
  synthetic sequence
gtggtatctctgc

SEQ ID NO: 14275 - DNA, 13 bp, Artificial Sequence
  synthetic sequence
tgcgcagtacctg

SEQ ID NO: 14276 - DNA, 13 bp, Artificial Sequence
  synthetic sequence
gcatgacagtaag

SEQ ID NO: 14277 - DNA, 13 bp, Artificial Sequence
  synthetic sequence
gagctcacagaat

SEQ ID NO: 14278 - DNA, 13 bp, Artificial Sequence
  synthetic sequence
gagcagggtctcc

SEQ ID NO: 14279 - DNA, 13 bp, Artificial Sequence
  synthetic sequence
caggttatattcc

SEQ ID NO: 14280 - DNA, 13 bp, Artificial Sequence
  synthetic sequence
acgtcatgtgcca

SEQ ID NO: 14281 - DNA, 13 bp, Artificial Sequence
  synthetic sequence
tttcactaaacca

SEQ ID NO: 14282 - DNA, 13 bp, Artificial Sequence
  synthetic sequence
caagatgcgcctc

SEQ ID NO: 14283 - DNA, 13 bp, Artificial Sequence
  synthetic sequence
gtttggcatggtg

SEQ ID NO: 14284 - DNA, 13 bp, Artificial Sequence
  synthetic sequence
ttggccgcgagat

SEQ ID NO: 14285 - DNA, 13 bp, Artificial Sequence
  synthetic sequence
acactgggttccc

SEQ ID NO: 14286 - DNA, 13 bp, Artificial Sequence
  synthetic sequence
agttgaatgggta

SEQ ID NO: 14287 - DNA, 13 bp, Artificial Sequence
  synthetic sequence
agaaactgttggg

SEQ ID NO: 14288 - DNA, 13 bp, Artificial Sequence
  synthetic sequence
aaacgctccttcc

SEQ ID NO: 14289 - DNA, 13 bp, Artificial Sequence
  synthetic sequence
tcgttcacgtaca

SEQ ID NO: 14290 - DNA, 13 bp, Artificial Sequence
  synthetic sequence
tcacgcgcgcgta

SEQ ID NO: 14291 - DNA, 13 bp, Artificial Sequence
  synthetic sequence
gttttgcagacag

SEQ ID NO: 14292 - DNA, 13 bp, Artificial Sequence
  synthetic sequence
attctgcggcgcg

SEQ ID NO: 14293 - DNA, 13 bp, Artificial Sequence
  synthetic sequence
ggtgaaaagttgt

SEQ ID NO: 14294 - DNA, 13 bp, Artificial Sequence
  synthetic sequence
caggttccgaaat

SEQ ID NO: 14295 - DNA, 13 bp, Artificial Sequence
  synthetic sequence
gccacacttattc

SEQ ID NO: 14296 - DNA, 13 bp, Artificial Sequence
  synthetic sequence
tactgaagtttgc

SEQ ID NO: 14297 - DNA, 13 bp, Artificial Sequence
  synthetic sequence
accgtcatcaccc

SEQ ID NO: 14298 - DNA, 13 bp, Artificial Sequence
  synthetic sequence
gcaagcgaatgtg

SEQ ID NO: 14299 - DNA, 13 bp, Artificial Sequence
  synthetic sequence
ttcggcatcgtca

SEQ ID NO: 14300 - DNA, 13 bp, Artificial Sequence
  synthetic sequence
aaagcagcaggtg

SEQ ID NO: 14301 - DNA, 13 bp, Artificial Sequence
  synthetic sequence
gccgtcggtggat

SEQ ID NO: 14302 - DNA, 13 bp, Artificial Sequence
  synthetic sequence
acgccgaaaccgc

SEQ ID NO: 14303 - DNA, 13 bp, Artificial Sequence
  synthetic sequence
acgcaggctgagg

SEQ ID NO: 14304 - DNA, 13 bp, Artificial Sequence
  synthetic sequence
attttcaaacctt

SEQ ID NO: 14305 - DNA, 13 bp, Artificial Sequence
  synthetic sequence
catggcagcacgt

SEQ ID NO: 14306 - DNA, 13 bp, Artificial Sequence
  synthetic sequence
ggcttcggtgttc

SEQ ID NO: 14307 - DNA, 13 bp, Artificial Sequence
  synthetic sequence
ttacgaaaatcgc

SEQ ID NO: 14308 - DNA, 13 bp, Artificial Sequence
  synthetic sequence
catttgggttggg

SEQ ID NO: 14309 - DNA, 13 bp, Artificial Sequence
  synthetic sequence
gcagcgcatgcac

SEQ ID NO: 14310 - DNA, 13 bp, Artificial Sequence
  synthetic sequence
ccttccatgtcac

SEQ ID NO: 14311 - DNA, 13 bp, Artificial Sequence
  synthetic sequence
tggccatgccttt

SEQ ID NO: 14312 - DNA, 13 bp, Artificial Sequence
  synthetic sequence
cgtggagtcgctc

SEQ ID NO: 14313 - DNA, 13 bp, Artificial Sequence
  synthetic sequence
cttaatgcttata

SEQ ID NO: 14314 - DNA, 13 bp, Artificial Sequence
  synthetic sequence
ccgtcgagagttt

SEQ ID NO: 14315 - DNA, 13 bp, Artificial Sequence
  synthetic sequence
aaaactttcgtta

SEQ ID NO: 14316 - DNA, 13 bp, Artificial Sequence
  synthetic sequence
ctcatcgagcatc

SEQ ID NO: 14317 - DNA, 13 bp, Artificial Sequence
  synthetic sequence
tacgccctacacg

SEQ ID NO: 14318 - DNA, 13 bp, Artificial Sequence
  synthetic sequence
catgcgattgctc

SEQ ID NO: 14319 - DNA, 13 bp, Artificial Sequence
  synthetic sequence
ctgcggccgatgt

SEQ ID NO: 14320 - DNA, 13 bp, Artificial Sequence
  synthetic sequence
tgattgccgccca

SEQ ID NO: 14321 - DNA, 13 bp, Artificial Sequence
  synthetic sequence
gtaacgatcagct

SEQ ID NO: 14322 - DNA, 13 bp, Artificial Sequence
  synthetic sequence
gctcgaatgcctg

SEQ ID NO: 14323 - DNA, 13 bp, Artificial Sequence
  synthetic sequence
atggcttttaccg

SEQ ID NO: 14324 - DNA, 13 bp, Artificial Sequence
  synthetic sequence
gcccacgttgacg

SEQ ID NO: 14325 - DNA, 13 bp, Artificial Sequence
  synthetic sequence
ccgcatatgtaat

SEQ ID NO: 14326 - DNA, 13 bp, Artificial Sequence
  synthetic sequence
cgaagctggtcaa

SEQ ID NO: 14327 - DNA, 13 bp, Artificial Sequence
  synthetic sequence
ggcctacacggtg

SEQ ID NO: 14328 - DNA, 13 bp, Artificial Sequence
  synthetic sequence
agaccctgttcga

SEQ ID NO: 14329 - DNA, 13 bp, Artificial Sequence
  synthetic sequence
aggccatgggcag

SEQ ID NO: 14330 - DNA, 13 bp, Artificial Sequence
  synthetic sequence
acaaaactattgc

SEQ ID NO: 14331 - DNA, 13 bp, Artificial Sequence
  synthetic sequence
accttcctgatcg

SEQ ID NO: 14332 - DNA, 13 bp, Artificial Sequence
  synthetic sequence
tatcgctacaaca

SEQ ID NO: 14333 - DNA, 13 bp, Artificial Sequence
  synthetic sequence
cgtttgccacggg

SEQ ID NO: 14334 - DNA, 13 bp, Artificial Sequence
  synthetic sequence
tgcggcaacagta

SEQ ID NO: 14335 - DNA, 13 bp, Artificial Sequence
  synthetic sequence
tttgcctgcatat

SEQ ID NO: 14336 - DNA, 13 bp, Artificial Sequence
  synthetic sequence
ttgtgtctggtgc

SEQ ID NO: 14337 - DNA, 13 bp, Artificial Sequence
  synthetic sequence
cagaggttggagt

SEQ ID NO: 14338 - DNA, 13 bp, Artificial Sequence
  synthetic sequence
tagtggtcgtaga

SEQ ID NO: 14339 - DNA, 13 bp, Artificial Sequence
  synthetic sequence
tcagtgcttcgaa

SEQ ID NO: 14340 - DNA, 13 bp, Artificial Sequence
  synthetic sequence
gccccaaataaca

SEQ ID NO: 14341 - DNA, 13 bp, Artificial Sequence
  synthetic sequence
tgcagaacgcaca

SEQ ID NO: 14342 - DNA, 13 bp, Artificial Sequence
  synthetic sequence
agttgctctctta

SEQ ID NO: 14343 - DNA, 13 bp, Artificial Sequence
  synthetic sequence
gcagaagactcgc

SEQ ID NO: 14344 - DNA, 13 bp, Artificial Sequence
  synthetic sequence
gctagtcaaactc

SEQ ID NO: 14345 - DNA, 13 bp, Artificial Sequence
  synthetic sequence
gttactaccacaa

SEQ ID NO: 14346 - DNA, 13 bp, Artificial Sequence
  synthetic sequence
tatttcccgggag

SEQ ID NO: 14347 - DNA, 13 bp, Artificial Sequence
  synthetic sequence
gagcggcatcgca

SEQ ID NO: 14348 - DNA, 13 bp, Artificial Sequence
  synthetic sequence
actgataaacgcc

SEQ ID NO: 14349 - DNA, 13 bp, Artificial Sequence
  synthetic sequence
acaaagaaaatag

SEQ ID NO: 14350 - DNA, 13 bp, Artificial Sequence
  synthetic sequence
ggcttcactagct

SEQ ID NO: 14351 - DNA, 13 bp, Artificial Sequence
  synthetic sequence
atactcacccgtg

SEQ ID NO: 14352 - DNA, 13 bp, Artificial Sequence
  synthetic sequence
ccaccctcgacga

SEQ ID NO: 14353 - DNA, 13 bp, Artificial Sequence
  synthetic sequence
atgaataaccatt

SEQ ID NO: 14354 - DNA, 13 bp, Artificial Sequence
  synthetic sequence
gctgaagctcggc

SEQ ID NO: 14355 - DNA, 13 bp, Artificial Sequence
  synthetic sequence
gtttcccaaattc

SEQ ID NO: 14356 - DNA, 13 bp, Artificial Sequence
  synthetic sequence
tgaacccgcttta

SEQ ID NO: 14357 - DNA, 13 bp, Artificial Sequence
  synthetic sequence
agcacgacaattg

SEQ ID NO: 14358 - DNA, 13 bp, Artificial Sequence
  synthetic sequence
cgagctggccgaa

SEQ ID NO: 14359 - DNA, 13 bp, Artificial Sequence
  synthetic sequence
ttatggcataaac

SEQ ID NO: 14360 - DNA, 13 bp, Artificial Sequence
  synthetic sequence
cagctcgtccatc

SEQ ID NO: 14361 - DNA, 13 bp, Artificial Sequence
  synthetic sequence
aaagaaattgccc

SEQ ID NO: 14362 - DNA, 13 bp, Artificial Sequence
  synthetic sequence
ttgtattggcgga

SEQ ID NO: 14363 - DNA, 13 bp, Artificial Sequence
  synthetic sequence
cttatcagggtca

SEQ ID NO: 14364 - DNA, 13 bp, Artificial Sequence
  synthetic sequence
gatatcaatggta

SEQ ID NO: 14365 - DNA, 13 bp, Artificial Sequence
  synthetic sequence
tgccattaaaaga

SEQ ID NO: 14366 - DNA, 13 bp, Artificial Sequence
  synthetic sequence
ccatcgccgcgaa

SEQ ID NO: 14367 - DNA, 13 bp, Artificial Sequence
  synthetic sequence
gataaacaaattg

SEQ ID NO: 14368 - DNA, 13 bp, Artificial Sequence
  synthetic sequence
atggcgaaagtcg

SEQ ID NO: 14369 - DNA, 13 bp, Artificial Sequence
  synthetic sequence
ctcggcgtttcat

SEQ ID NO: 14370 - DNA, 13 bp, Artificial Sequence
  synthetic sequence
ttcaccgtggcat

SEQ ID NO: 14371 - DNA, 13 bp, Artificial Sequence
  synthetic sequence
atatggctcaccg

SEQ ID NO: 14372 - DNA, 13 bp, Artificial Sequence
  synthetic sequence
ccaacgcgcttgg

SEQ ID NO: 14373 - DNA, 13 bp, Artificial Sequence
  synthetic sequence
tttgctcttacaa

SEQ ID NO: 14374 - DNA, 13 bp, Artificial Sequence
  synthetic sequence
cttcctgcgataa

SEQ ID NO: 14375 - DNA, 13 bp, Artificial Sequence
  synthetic sequence
gtaattcgctaac

SEQ ID NO: 14376 - DNA, 13 bp, Artificial Sequence
  synthetic sequence
caaacacagttca

SEQ ID NO: 14377 - DNA, 13 bp, Artificial Sequence
  synthetic sequence
tgagcgtcgcgaa

SEQ ID NO: 14378 - DNA, 13 bp, Artificial Sequence
  synthetic sequence
ctttgtattggac

SEQ ID NO: 14379 - DNA, 13 bp, Artificial Sequence
  synthetic sequence
cggtgatggcgac

SEQ ID NO: 14380 - DNA, 13 bp, Artificial Sequence
  synthetic sequence
taaggcctgccag

SEQ ID NO: 14381 - DNA, 13 bp, Artificial Sequence
  synthetic sequence
tgctggaaagcct

SEQ ID NO: 14382 - DNA, 13 bp, Artificial Sequence
  synthetic sequence
tggtctatttgac

SEQ ID NO: 14383 - DNA, 13 bp, Artificial Sequence
  synthetic sequence
tgatcggcccgct

SEQ ID NO: 14384 - DNA, 13 bp, Artificial Sequence
  synthetic sequence
acttgacccactt

SEQ ID NO: 14385 - DNA, 13 bp, Artificial Sequence
  synthetic sequence
gaatcaatcctac

SEQ ID NO: 14386 - DNA, 13 bp, Artificial Sequence
  synthetic sequence
aaaacaaagtccc

SEQ ID NO: 14387 - DNA, 13 bp, Artificial Sequence
  synthetic sequence
tacggttcgccgc

SEQ ID NO: 14388 - DNA, 13 bp, Artificial Sequence
  synthetic sequence
gcctatccacgct

SEQ ID NO: 14389 - DNA, 13 bp, Artificial Sequence
  synthetic sequence
taagctggagccg

SEQ ID NO: 14390 - DNA, 13 bp, Artificial Sequence
  synthetic sequence
gatgcgctcgtgc

SEQ ID NO: 14391 - DNA, 13 bp, Artificial Sequence
  synthetic sequence
cacgcttagcata

SEQ ID NO: 14392 - DNA, 13 bp, Artificial Sequence
  synthetic sequence
cctgctggaccac

SEQ ID NO: 14393 - DNA, 13 bp, Artificial Sequence
  synthetic sequence
tcttggtcgagag

SEQ ID NO: 14394 - DNA, 13 bp, Artificial Sequence
  synthetic sequence
taccgccattttg

SEQ ID NO: 14395 - DNA, 13 bp, Artificial Sequence
  synthetic sequence
ttggtgcactaag

SEQ ID NO: 14396 - DNA, 13 bp, Artificial Sequence
  synthetic sequence
caaagaactgtaa

SEQ ID NO: 14397 - DNA, 13 bp, Artificial Sequence
  synthetic sequence
ccggctctcgatc

SEQ ID NO: 14398 - DNA, 13 bp, Artificial Sequence
  synthetic sequence
ggtcagcatacag

SEQ ID NO: 14399 - DNA, 13 bp, Artificial Sequence
  synthetic sequence
ccattaaataaca

SEQ ID NO: 14400 - DNA, 13 bp, Artificial Sequence
  synthetic sequence
atcccaatgtctt

SEQ ID NO: 14401 - DNA, 13 bp, Artificial Sequence
  synthetic sequence
aattcagggtcaa

SEQ ID NO: 14402 - DNA, 13 bp, Artificial Sequence
  synthetic sequence
ccggctcggttac

SEQ ID NO: 14403 - DNA, 13 bp, Artificial Sequence
  synthetic sequence
agacggtgattgc

SEQ ID NO: 14404 - DNA, 13 bp, Artificial Sequence
  synthetic sequence
aggacaaattccc

SEQ ID NO: 14405 - DNA, 13 bp, Artificial Sequence
  synthetic sequence
ttattggcttagc

SEQ ID NO: 14406 - DNA, 13 bp, Artificial Sequence
  synthetic sequence
gtactatatcatt

SEQ ID NO: 14407 - DNA, 13 bp, Artificial Sequence
  synthetic sequence
ccgtgatagctcg

SEQ ID NO: 14408 - DNA, 13 bp, Artificial Sequence
  synthetic sequence
gtgacctttgggt

SEQ ID NO: 14409 - DNA, 13 bp, Artificial Sequence
  synthetic sequence
cgtgatcgcgttc

SEQ ID NO: 14410 - DNA, 13 bp, Artificial Sequence
  synthetic sequence
ctcaaattagccc

SEQ ID NO: 14411 - DNA, 13 bp, Artificial Sequence
  synthetic sequence
tggcgagaccgga

SEQ ID NO: 14412 - DNA, 13 bp, Artificial Sequence
  synthetic sequence
tgttgcatttaca

SEQ ID NO: 14413 - DNA, 13 bp, Artificial Sequence
  synthetic sequence
tcgatccaataag

SEQ ID NO: 14414 - DNA, 13 bp, Artificial Sequence
  synthetic sequence
gtccgatgaccga

SEQ ID NO: 14415 - DNA, 13 bp, Artificial Sequence
  synthetic sequence
cagtaccagtaag

SEQ ID NO: 14416 - DNA, 13 bp, Artificial Sequence
  synthetic sequence
agccagtttgcca

SEQ ID NO: 14417 - DNA, 13 bp, Artificial Sequence
  synthetic sequence
gttaagacaattc

SEQ ID NO: 14418 - DNA, 13 bp, Artificial Sequence
  synthetic sequence
tttcttttcctta

SEQ ID NO: 14419 - DNA, 13 bp, Artificial Sequence
  synthetic sequence
ccttgatcgcccc

SEQ ID NO: 14420 - DNA, 13 bp, Artificial Sequence
  synthetic sequence
cttttgctcaatc

SEQ ID NO: 14421 - DNA, 13 bp, Artificial Sequence
  synthetic sequence
cggacatcgccaa

SEQ ID NO: 14422 - DNA, 13 bp, Artificial Sequence
  synthetic sequence
accgcggaggtga

SEQ ID NO: 14423 - DNA, 13 bp, Artificial Sequence
  synthetic sequence
ggcggatattcgt

SEQ ID NO: 14424 - DNA, 13 bp, Artificial Sequence
  synthetic sequence
ggctgtgcgctta

SEQ ID NO: 14425 - DNA, 13 bp, Artificial Sequence
  synthetic sequence
caggatattactg

SEQ ID NO: 14426 - DNA, 13 bp, Artificial Sequence
  synthetic sequence
gcgctaacacaat

SEQ ID NO: 14427 - DNA, 13 bp, Artificial Sequence
  synthetic sequence
gtattaaccgcgg

SEQ ID NO: 14428 - DNA, 13 bp, Artificial Sequence
  synthetic sequence
ttgtgcagggcac

SEQ ID NO: 14429 - DNA, 13 bp, Artificial Sequence
  synthetic sequence
tgtctctcatggc

SEQ ID NO: 14430 - DNA, 13 bp, Artificial Sequence
  synthetic sequence
cggcaaatgtgaa

SEQ ID NO: 14431 - DNA, 13 bp, Artificial Sequence
  synthetic sequence
tggagtagtcgac

SEQ ID NO: 14432 - DNA, 13 bp, Artificial Sequence
  synthetic sequence
ccgcgttgtttca

SEQ ID NO: 14433 - DNA, 13 bp, Artificial Sequence
  synthetic sequence
ggtggctgttggc

SEQ ID NO: 14434 - DNA, 13 bp, Artificial Sequence
  synthetic sequence
gatccctgctggt

SEQ ID NO: 14435 - DNA, 13 bp, Artificial Sequence
  synthetic sequence
tgactttattgga

SEQ ID NO: 14436 - DNA, 13 bp, Artificial Sequence
  synthetic sequence
gcagcacgtagaa

SEQ ID NO: 14437 - DNA, 13 bp, Artificial Sequence
  synthetic sequence
cacggattgactg

SEQ ID NO: 14438 - DNA, 13 bp, Artificial Sequence
  synthetic sequence
cgaaccggctttc

SEQ ID NO: 14439 - DNA, 13 bp, Artificial Sequence
  synthetic sequence
gcgattgcataaa

SEQ ID NO: 14440 - DNA, 13 bp, Artificial Sequence
  synthetic sequence
acgaggcttatgt

SEQ ID NO: 14441 - DNA, 13 bp, Artificial Sequence
  synthetic sequence
aagtctatgttga

SEQ ID NO: 14442 - DNA, 13 bp, Artificial Sequence
  synthetic sequence
acatcgaggaggg

SEQ ID NO: 14443 - DNA, 13 bp, Artificial Sequence
  synthetic sequence
atcatcggtcacg

SEQ ID NO: 14444 - DNA, 13 bp, Artificial Sequence
  synthetic sequence
gatggcttccatc

SEQ ID NO: 14445 - DNA, 13 bp, Artificial Sequence
  synthetic sequence
gatatccgcaacc

SEQ ID NO: 14446 - DNA, 13 bp, Artificial Sequence
  synthetic sequence
gggtatcggtgtg

SEQ ID NO: 14447 - DNA, 13 bp, Artificial Sequence
  synthetic sequence
aacctacaatcat

SEQ ID NO: 14448 - DNA, 13 bp, Artificial Sequence
  synthetic sequence
gatcccaagccct

SEQ ID NO: 14449 - DNA, 13 bp, Artificial Sequence
  synthetic sequence
aattgttcaaagc

SEQ ID NO: 14450 - DNA, 13 bp, Artificial Sequence
  synthetic sequence
aaactcactgaga

SEQ ID NO: 14451 - DNA, 13 bp, Artificial Sequence
  synthetic sequence
ttctgctccttta

SEQ ID NO: 14452 - DNA, 13 bp, Artificial Sequence
  synthetic sequence
tgatgtctaacag

SEQ ID NO: 14453 - DNA, 13 bp, Artificial Sequence
  synthetic sequence
ccttttgccctct

SEQ ID NO: 14454 - DNA, 13 bp, Artificial Sequence
  synthetic sequence
ttatgctgaccca

SEQ ID NO: 14455 - DNA, 13 bp, Artificial Sequence
  synthetic sequence
aaaacaggggaaa

SEQ ID NO: 14456 - DNA, 13 bp, Artificial Sequence
  synthetic sequence
gtgtgcttacaag

SEQ ID NO: 14457 - DNA, 13 bp, Artificial Sequence
  synthetic sequence
cgatcaagtgcgt

SEQ ID NO: 14458 - DNA, 13 bp, Artificial Sequence
  synthetic sequence
gcaatggcgttgg

SEQ ID NO: 14459 - DNA, 13 bp, Artificial Sequence
  synthetic sequence
aacaggagccact

SEQ ID NO: 14460 - DNA, 13 bp, Artificial Sequence
  synthetic sequence
aggctgaaaacca

SEQ ID NO: 14461 - DNA, 13 bp, Artificial Sequence
  synthetic sequence
gatcaagcatgac

SEQ ID NO: 14462 - DNA, 13 bp, Artificial Sequence
  synthetic sequence
tcggtgccgcagt

SEQ ID NO: 14463 - DNA, 13 bp, Artificial Sequence
  synthetic sequence
tttaatccactag

SEQ ID NO: 14464 - DNA, 13 bp, Artificial Sequence
  synthetic sequence
gacctgggcaaga

SEQ ID NO: 14465 - DNA, 13 bp, Artificial Sequence
  synthetic sequence
aatgaacctgcct

SEQ ID NO: 14466 - DNA, 13 bp, Artificial Sequence
  synthetic sequence
tggttgatctgaa

SEQ ID NO: 14467 - DNA, 13 bp, Artificial Sequence
  synthetic sequence
ccatcgcgtcgag

SEQ ID NO: 14468 - DNA, 13 bp, Artificial Sequence
  synthetic sequence
aagttcctgtcgc

SEQ ID NO: 14469 - DNA, 13 bp, Artificial Sequence
  synthetic sequence
gcccttgaggacc

SEQ ID NO: 14470 - DNA, 13 bp, Artificial Sequence
  synthetic sequence
gcgctgccttcga

SEQ ID NO: 14471 - DNA, 13 bp, Artificial Sequence
  synthetic sequence
tagttcgacaaag

SEQ ID NO: 14472 - DNA, 13 bp, Artificial Sequence
  synthetic sequence
caagagcgctggg

SEQ ID NO: 14473 - DNA, 13 bp, Artificial Sequence
  synthetic sequence
gtaattacctcta

SEQ ID NO: 14474 - DNA, 13 bp, Artificial Sequence
  synthetic sequence
actttgccgccta

SEQ ID NO: 14475 - DNA, 13 bp, Artificial Sequence
  synthetic sequence
tgtccagggacaa

SEQ ID NO: 14476 - DNA, 13 bp, Artificial Sequence
  synthetic sequence
ctttcgctgagct

SEQ ID NO: 14477 - DNA, 13 bp, Artificial Sequence
  synthetic sequence
tcagtatcggcga

SEQ ID NO: 14478 - DNA, 13 bp, Artificial Sequence
  synthetic sequence
cagcacatgaagc

SEQ ID NO: 14479 - DNA, 13 bp, Artificial Sequence
  synthetic sequence
ggtgagcgcatcc

SEQ ID NO: 14480 - DNA, 13 bp, Artificial Sequence
  synthetic sequence
ggccacagtgcca

SEQ ID NO: 14481 - DNA, 13 bp, Artificial Sequence
  synthetic sequence
tgccatagagttg

SEQ ID NO: 14482 - DNA, 13 bp, Artificial Sequence
  synthetic sequence
gcgcaccacatct

SEQ ID NO: 14483 - DNA, 13 bp, Artificial Sequence
  synthetic sequence
gccagcaggagat

SEQ ID NO: 14484 - DNA, 13 bp, Artificial Sequence
  synthetic sequence
atccttttcatag

SEQ ID NO: 14485 - DNA, 13 bp, Artificial Sequence
  synthetic sequence
acaagttcagcgt

SEQ ID NO: 14486 - DNA, 13 bp, Artificial Sequence
  synthetic sequence
ctcgcagaaccct

SEQ ID NO: 14487 - DNA, 13 bp, Artificial Sequence
  synthetic sequence
aacagccggagcc

SEQ ID NO: 14488 - DNA, 13 bp, Artificial Sequence
  synthetic sequence
aagtttaatggcc

SEQ ID NO: 14489 - DNA, 13 bp, Artificial Sequence
  synthetic sequence
cacagggaggaat

SEQ ID NO: 14490 - DNA, 13 bp, Artificial Sequence
  synthetic sequence
ttcgccaccggca

SEQ ID NO: 14491 - DNA, 13 bp, Artificial Sequence
  synthetic sequence
aatacgattgata

SEQ ID NO: 14492 - DNA, 13 bp, Artificial Sequence
  synthetic sequence
ctggctacgaccc

SEQ ID NO: 14493 - DNA, 13 bp, Artificial Sequence
  synthetic sequence
tctttgccaatga

SEQ ID NO: 14494 - DNA, 13 bp, Artificial Sequence
  synthetic sequence
ctctgcaaattcg

SEQ ID NO: 14495 - DNA, 13 bp, Artificial Sequence
  synthetic sequence
atgcacatccaat

SEQ ID NO: 14496 - DNA, 13 bp, Artificial Sequence
  synthetic sequence
aagagcactttca

SEQ ID NO: 14497 - DNA, 13 bp, Artificial Sequence
  synthetic sequence
ccctcggtgccta

SEQ ID NO: 14498 - DNA, 13 bp, Artificial Sequence
  synthetic sequence
acgttgcgtactg

SEQ ID NO: 14499 - DNA, 13 bp, Artificial Sequence
  synthetic sequence
cgtcctcggaaac

SEQ ID NO: 14500 - DNA, 13 bp, Artificial Sequence
  synthetic sequence
attatgctcaccc

SEQ ID NO: 14501 - DNA, 13 bp, Artificial Sequence
  synthetic sequence
ggcccaggttgtc

SEQ ID NO: 14502 - DNA, 13 bp, Artificial Sequence
  synthetic sequence
agccggtctattt

SEQ ID NO: 14503 - DNA, 13 bp, Artificial Sequence
  synthetic sequence
agtaggtcgcatt

SEQ ID NO: 14504 - DNA, 13 bp, Artificial Sequence
  synthetic sequence
tgatggtggcgtc

SEQ ID NO: 14505 - DNA, 13 bp, Artificial Sequence
  synthetic sequence
atcgatcgtctcg

SEQ ID NO: 14506 - DNA, 13 bp, Artificial Sequence
  synthetic sequence
gggaagagggtcc

SEQ ID NO: 14507 - DNA, 13 bp, Artificial Sequence
  synthetic sequence
accaggcgactta

SEQ ID NO: 14508 - DNA, 13 bp, Artificial Sequence
  synthetic sequence
aagcgcgggcatt

SEQ ID NO: 14509 - DNA, 13 bp, Artificial Sequence
  synthetic sequence
tggctgatgaaga

SEQ ID NO: 14510 - DNA, 13 bp, Artificial Sequence
  synthetic sequence
agccctgccactg

SEQ ID NO: 14511 - DNA, 13 bp, Artificial Sequence
  synthetic sequence
cacctcgaccttt

SEQ ID NO: 14512 - DNA, 13 bp, Artificial Sequence
  synthetic sequence
cgtcgaccttcac

SEQ ID NO: 14513 - DNA, 13 bp, Artificial Sequence
  synthetic sequence
cgttgctgttggc

SEQ ID NO: 14514 - DNA, 13 bp, Artificial Sequence
  synthetic sequence
tgatgaatcgcgt

SEQ ID NO: 14515 - DNA, 13 bp, Artificial Sequence
  synthetic sequence
tgatgcggttgga

SEQ ID NO: 14516 - DNA, 13 bp, Artificial Sequence
  synthetic sequence
gtgaacgacggat

SEQ ID NO: 14517 - DNA, 13 bp, Artificial Sequence
  synthetic sequence
gacaccttgaggt

SEQ ID NO: 14518 - DNA, 13 bp, Artificial Sequence
  synthetic sequence
gtattgatgtcag

SEQ ID NO: 14519 - DNA, 13 bp, Artificial Sequence
  synthetic sequence
gccacggcgaagt

SEQ ID NO: 14520 - DNA, 13 bp, Artificial Sequence
  synthetic sequence
accaaaccgttat

SEQ ID NO: 14521 - DNA, 13 bp, Artificial Sequence
  synthetic sequence
aatggaccaataa

SEQ ID NO: 14522 - DNA, 13 bp, Artificial Sequence
  synthetic sequence
gacagcctcgcac

SEQ ID NO: 14523 - DNA, 13 bp, Artificial Sequence
  synthetic sequence
gacagaaaagtat

SEQ ID NO: 14524 - DNA, 13 bp, Artificial Sequence
  synthetic sequence
tttacggtaaatt

SEQ ID NO: 14525 - DNA, 13 bp, Artificial Sequence
  synthetic sequence
gactggaaaggca

SEQ ID NO: 14526 - DNA, 13 bp, Artificial Sequence
  synthetic sequence
tctcaagggcatc

SEQ ID NO: 14527 - DNA, 13 bp, Artificial Sequence
  synthetic sequence
tcgccgacatggc

SEQ ID NO: 14528 - DNA, 13 bp, Artificial Sequence
  synthetic sequence
tagggaagcttat

SEQ ID NO: 14529 - DNA, 13 bp, Artificial Sequence
  synthetic sequence
ctggctgttttgg

SEQ ID NO: 14530 - DNA, 13 bp, Artificial Sequence
  synthetic sequence
ttggagggaattc

SEQ ID NO: 14531 - DNA, 13 bp, Artificial Sequence
  synthetic sequence
aaggttgttgttc

SEQ ID NO: 14532 - DNA, 13 bp, Artificial Sequence
  synthetic sequence
ttggtttctacac

SEQ ID NO: 14533 - DNA, 13 bp, Artificial Sequence
  synthetic sequence
actgggtgtgtct

SEQ ID NO: 14534 - DNA, 13 bp, Artificial Sequence
  synthetic sequence
tcaacgaacgcat

SEQ ID NO: 14535 - DNA, 13 bp, Artificial Sequence
  synthetic sequence
gtggacatctccc

SEQ ID NO: 14536 - DNA, 13 bp, Artificial Sequence
  synthetic sequence
ggagtttcttctg

SEQ ID NO: 14537 - DNA, 13 bp, Artificial Sequence
  synthetic sequence
gacggcgtgctct

SEQ ID NO: 14538 - DNA, 13 bp, Artificial Sequence
  synthetic sequence
cgagccgttcttg

SEQ ID NO: 14539 - DNA, 13 bp, Artificial Sequence
  synthetic sequence
tccggcaagttcg

SEQ ID NO: 14540 - DNA, 13 bp, Artificial Sequence
  synthetic sequence
ttgcatctgacgg

SEQ ID NO: 14541 - DNA, 13 bp, Artificial Sequence
  synthetic sequence
gggcattgacgtt

SEQ ID NO: 14542 - DNA, 13 bp, Artificial Sequence
  synthetic sequence
tattcaaggtttt

SEQ ID NO: 14543 - DNA, 13 bp, Artificial Sequence
  synthetic sequence
agcgcgatagtgc

SEQ ID NO: 14544 - DNA, 13 bp, Artificial Sequence
  synthetic sequence
accgtgcagcagc

SEQ ID NO: 14545 - DNA, 13 bp, Artificial Sequence
  synthetic sequence
ccatgatgtcatc

SEQ ID NO: 14546 - DNA, 13 bp, Artificial Sequence
  synthetic sequence
ctcggagcgctga

SEQ ID NO: 14547 - DNA, 13 bp, Artificial Sequence
  synthetic sequence
tccattatcttct

SEQ ID NO: 14548 - DNA, 13 bp, Artificial Sequence
  synthetic sequence
gaccaacccgaaa

SEQ ID NO: 14549 - DNA, 13 bp, Artificial Sequence
  synthetic sequence
tcaaaatagctat

SEQ ID NO: 14550 - DNA, 13 bp, Artificial Sequence
  synthetic sequence
gacgagattgtgc

SEQ ID NO: 14551 - DNA, 13 bp, Artificial Sequence
  synthetic sequence
cgaagtggcgaaa

SEQ ID NO: 14552 - DNA, 13 bp, Artificial Sequence
  synthetic sequence
tcatccgttgagg

SEQ ID NO: 14553 - DNA, 13 bp, Artificial Sequence
  synthetic sequence
gcaaacccgtatt

SEQ ID NO: 14554 - DNA, 13 bp, Artificial Sequence
  synthetic sequence
ggtaaccggcaat

SEQ ID NO: 14555 - DNA, 13 bp, Artificial Sequence
  synthetic sequence
ggccgtgagtttt

SEQ ID NO: 14556 - DNA, 13 bp, Artificial Sequence
  synthetic sequence
ggcatattctgtc

SEQ ID NO: 14557 - DNA, 13 bp, Artificial Sequence
  synthetic sequence
ccttgttcattat

SEQ ID NO: 14558 - DNA, 13 bp, Artificial Sequence
  synthetic sequence
ctcttcacttcgt

SEQ ID NO: 14559 - DNA, 13 bp, Artificial Sequence
  synthetic sequence
acttaaaagccga

SEQ ID NO: 14560 - DNA, 13 bp, Artificial Sequence
  synthetic sequence
aaagcgctctcta

SEQ ID NO: 14561 - DNA, 13 bp, Artificial Sequence
  synthetic sequence
aagtaccggtgag

SEQ ID NO: 14562 - DNA, 13 bp, Artificial Sequence
  synthetic sequence
acgtaccgattcg

SEQ ID NO: 14563 - DNA, 13 bp, Artificial Sequence
  synthetic sequence
gatttgaaatagc

SEQ ID NO: 14564 - DNA, 13 bp, Artificial Sequence
  synthetic sequence
cgtggcgctgatt

SEQ ID NO: 14565 - DNA, 13 bp, Artificial Sequence
  synthetic sequence
gccgggctgtcaa

SEQ ID NO: 14566 - DNA, 13 bp, Artificial Sequence
  synthetic sequence
ctcaggttgaggt

SEQ ID NO: 14567 - DNA, 13 bp, Artificial Sequence
  synthetic sequence
cgaaactacggtc

SEQ ID NO: 14568 - DNA, 13 bp, Artificial Sequence
  synthetic sequence
tcctgagtcatgt

SEQ ID NO: 14569 - DNA, 13 bp, Artificial Sequence
  synthetic sequence
gctcaacaaagga

SEQ ID NO: 14570 - DNA, 13 bp, Artificial Sequence
  synthetic sequence
aattgcagtcctg

SEQ ID NO: 14571 - DNA, 13 bp, Artificial Sequence
  synthetic sequence
gagagcgatttat

SEQ ID NO: 14572 - DNA, 13 bp, Artificial Sequence
  synthetic sequence
attgatacagcgt

SEQ ID NO: 14573 - DNA, 13 bp, Artificial Sequence
  synthetic sequence
actacagccgcgc

SEQ ID NO: 14574 - DNA, 13 bp, Artificial Sequence
  synthetic sequence
ctattccaatcac

SEQ ID NO: 14575 - DNA, 13 bp, Artificial Sequence
  synthetic sequence
ctttggcctcgat

SEQ ID NO: 14576 - DNA, 13 bp, Artificial Sequence
  synthetic sequence
catcgtccttgcg

SEQ ID NO: 14577 - DNA, 13 bp, Artificial Sequence
  synthetic sequence
ccaacacgcgacg

SEQ ID NO: 14578 - DNA, 13 bp, Artificial Sequence
  synthetic sequence
ccagtccccagta

SEQ ID NO: 14579 - DNA, 13 bp, Artificial Sequence
  synthetic sequence
atggcggtgcatc

SEQ ID NO: 14580 - DNA, 13 bp, Artificial Sequence
  synthetic sequence
gcgggcggttatt

SEQ ID NO: 14581 - DNA, 13 bp, Artificial Sequence
  synthetic sequence
tgcagatttccga

SEQ ID NO: 14582 - DNA, 13 bp, Artificial Sequence
  synthetic sequence
cgatttatccgct

SEQ ID NO: 14583 - DNA, 13 bp, Artificial Sequence
  synthetic sequence
gatttgcgtgttg

SEQ ID NO: 14584 - DNA, 13 bp, Artificial Sequence
  synthetic sequence
ttcgtcggtgttg

SEQ ID NO: 14585 - DNA, 13 bp, Artificial Sequence
  synthetic sequence
aactgggcgacaa

SEQ ID NO: 14586 - DNA, 13 bp, Artificial Sequence
  synthetic sequence
gatattgatcaat

SEQ ID NO: 14587 - DNA, 13 bp, Artificial Sequence
  synthetic sequence
ggtggcggtcagt

SEQ ID NO: 14588 - DNA, 13 bp, Artificial Sequence
  synthetic sequence
cggtgacgttcac

SEQ ID NO: 14589 - DNA, 13 bp, Artificial Sequence
  synthetic sequence
aattacagcttga

SEQ ID NO: 14590 - DNA, 13 bp, Artificial Sequence
  synthetic sequence
ttcgataatgcgg

SEQ ID NO: 14591 - DNA, 13 bp, Artificial Sequence
  synthetic sequence
agtcgctgtttaa

SEQ ID NO: 14592 - DNA, 13 bp, Artificial Sequence
  synthetic sequence
ccagacgccgcat

SEQ ID NO: 14593 - DNA, 13 bp, Artificial Sequence
  synthetic sequence
atcaggaaaccaa

SEQ ID NO: 14594 - DNA, 13 bp, Artificial Sequence
  synthetic sequence
catgctgacgatg

SEQ ID NO: 14595 - DNA, 13 bp, Artificial Sequence
  synthetic sequence
cttttcgatagga

SEQ ID NO: 14596 - DNA, 13 bp, Artificial Sequence
  synthetic sequence
tcagccaacgcat

SEQ ID NO: 14597 - DNA, 13 bp, Artificial Sequence
  synthetic sequence
gaacggtttcgcc

SEQ ID NO: 14598 - DNA, 13 bp, Artificial Sequence
  synthetic sequence
ctcccgcgtgatc

SEQ ID NO: 14599 - DNA, 13 bp, Artificial Sequence
  synthetic sequence
gcaaggcgttcgc

SEQ ID NO: 14600 - DNA, 13 bp, Artificial Sequence
  synthetic sequence
cttcagttactgc

SEQ ID NO: 14601 - DNA, 13 bp, Artificial Sequence
  synthetic sequence
aggtacacacggc

SEQ ID NO: 14602 - DNA, 13 bp, Artificial Sequence
  synthetic sequence
atgccgccgtcag

SEQ ID NO: 14603 - DNA, 13 bp, Artificial Sequence
  synthetic sequence
ttggcaccggagc

SEQ ID NO: 14604 - DNA, 13 bp, Artificial Sequence
  synthetic sequence
acgcttcgttgct

SEQ ID NO: 14605 - DNA, 13 bp, Artificial Sequence
  synthetic sequence
tgcttgcagaagc

SEQ ID NO: 14606 - DNA, 13 bp, Artificial Sequence
  synthetic sequence
aatacaaccatta

SEQ ID NO: 14607 - DNA, 13 bp, Artificial Sequence
  synthetic sequence
ctgtcgcgctcga

SEQ ID NO: 14608 - DNA, 13 bp, Artificial Sequence
  synthetic sequence
cttaggaaggatg

SEQ ID NO: 14609 - DNA, 13 bp, Artificial Sequence
  synthetic sequence
tgaccctactgaa

SEQ ID NO: 14610 - DNA, 13 bp, Artificial Sequence
  synthetic sequence
tatgtggtaatct

SEQ ID NO: 14611 - DNA, 13 bp, Artificial Sequence
  synthetic sequence
gacaccagcttcg

SEQ ID NO: 14612 - DNA, 13 bp, Artificial Sequence
  synthetic sequence
ggtagtggtgtcg

SEQ ID NO: 14613 - DNA, 13 bp, Artificial Sequence
  synthetic sequence
ccaactcctccat

SEQ ID NO: 14614 - DNA, 13 bp, Artificial Sequence
  synthetic sequence
acaacgtttgctg

SEQ ID NO: 14615 - DNA, 13 bp, Artificial Sequence
  synthetic sequence
cgttgctgcgctt

SEQ ID NO: 14616 - DNA, 13 bp, Artificial Sequence
  synthetic sequence
atagacaatactt

SEQ ID NO: 14617 - DNA, 13 bp, Artificial Sequence
  synthetic sequence
gatccttgcgcaa

SEQ ID NO: 14618 - DNA, 13 bp, Artificial Sequence
  synthetic sequence
caagctttgcact

SEQ ID NO: 14619 - DNA, 13 bp, Artificial Sequence
  synthetic sequence
cagatagttcgcc

SEQ ID NO: 14620 - DNA, 13 bp, Artificial Sequence
  synthetic sequence
actctcgcgagtt

SEQ ID NO: 14621 - DNA, 13 bp, Artificial Sequence
  synthetic sequence
agaaaacaatcag

SEQ ID NO: 14622 - DNA, 13 bp, Artificial Sequence
  synthetic sequence
agatgttgcacgt

SEQ ID NO: 14623 - DNA, 13 bp, Artificial Sequence
  synthetic sequence
ggatatgggcacg

SEQ ID NO: 14624 - DNA, 13 bp, Artificial Sequence
  synthetic sequence
atcgatcacggcg

SEQ ID NO: 14625 - DNA, 13 bp, Artificial Sequence
  synthetic sequence
aatgtgactcaaa

SEQ ID NO: 14626 - DNA, 13 bp, Artificial Sequence
  synthetic sequence
tttaaagcgggca

SEQ ID NO: 14627 - DNA, 13 bp, Artificial Sequence
  synthetic sequence
aaattctgtcgtt

SEQ ID NO: 14628 - DNA, 13 bp, Artificial Sequence
  synthetic sequence
taataaccttgat

SEQ ID NO: 14629 - DNA, 13 bp, Artificial Sequence
  synthetic sequence
gatctttatcatg

SEQ ID NO: 14630 - DNA, 13 bp, Artificial Sequence
  synthetic sequence
atggtggtgatgc

SEQ ID NO: 14631 - DNA, 13 bp, Artificial Sequence
  synthetic sequence
aatgcagtgcggc

SEQ ID NO: 14632 - DNA, 13 bp, Artificial Sequence
  synthetic sequence
ctccaaatggatt

SEQ ID NO: 14633 - DNA, 13 bp, Artificial Sequence
  synthetic sequence
accaccccattcg

SEQ ID NO: 14634 - DNA, 13 bp, Artificial Sequence
  synthetic sequence
atcacttataacc

SEQ ID NO: 14635 - DNA, 13 bp, Artificial Sequence
  synthetic sequence
aagagctcaaaac

SEQ ID NO: 14636 - DNA, 13 bp, Artificial Sequence
  synthetic sequence
gatgtcggcaagg

SEQ ID NO: 14637 - DNA, 13 bp, Artificial Sequence
  synthetic sequence
aatcttattgacc

SEQ ID NO: 14638 - DNA, 13 bp, Artificial Sequence
  synthetic sequence
cgccttcggtcac

SEQ ID NO: 14639 - DNA, 13 bp, Artificial Sequence
  synthetic sequence
tgggaaatggtgg

SEQ ID NO: 14640 - DNA, 13 bp, Artificial Sequence
  synthetic sequence
gccgtcatgctcc

SEQ ID NO: 14641 - DNA, 13 bp, Artificial Sequence
  synthetic sequence
cccagagacgagg

SEQ ID NO: 14642 - DNA, 13 bp, Artificial Sequence
  synthetic sequence
ttcgagccatgct

SEQ ID NO: 14643 - DNA, 13 bp, Artificial Sequence
  synthetic sequence
ctgaagttgaccg

SEQ ID NO: 14644 - DNA, 13 bp, Artificial Sequence
  synthetic sequence
tgtcgctgatggc

SEQ ID NO: 14645 - DNA, 13 bp, Artificial Sequence
  synthetic sequence
ctaatattcccta

SEQ ID NO: 14646 - DNA, 13 bp, Artificial Sequence
  synthetic sequence
cttatggcattac

SEQ ID NO: 14647 - DNA, 13 bp, Artificial Sequence
  synthetic sequence
accttcagatata

SEQ ID NO: 14648 - DNA, 13 bp, Artificial Sequence
  synthetic sequence
ggtctctttatcg

SEQ ID NO: 14649 - DNA, 13 bp, Artificial Sequence
  synthetic sequence
caatagcagtgaa

SEQ ID NO: 14650 - DNA, 13 bp, Artificial Sequence
  synthetic sequence
tggacgtacgtaa

SEQ ID NO: 14651 - DNA, 13 bp, Artificial Sequence
  synthetic sequence
cccgatgtcattc

SEQ ID NO: 14652 - DNA, 13 bp, Artificial Sequence
  synthetic sequence
tgtgtttagaatg

SEQ ID NO: 14653 - DNA, 13 bp, Artificial Sequence
  synthetic sequence
gatgccgctaacg

SEQ ID NO: 14654 - DNA, 13 bp, Artificial Sequence
  synthetic sequence
ggggagtagcagc

SEQ ID NO: 14655 - DNA, 13 bp, Artificial Sequence
  synthetic sequence
catattcctttca

SEQ ID NO: 14656 - DNA, 13 bp, Artificial Sequence
  synthetic sequence
ctggcaacctaca

SEQ ID NO: 14657 - DNA, 13 bp, Artificial Sequence
  synthetic sequence
agtagtcaaccac

SEQ ID NO: 14658 - DNA, 13 bp, Artificial Sequence
  synthetic sequence
tcgtgggatatac

SEQ ID NO: 14659 - DNA, 13 bp, Artificial Sequence
  synthetic sequence
gagaatatctgcc

SEQ ID NO: 14660 - DNA, 13 bp, Artificial Sequence
  synthetic sequence
tgagtattggcgc

SEQ ID NO: 14661 - DNA, 13 bp, Artificial Sequence
  synthetic sequence
tcagcgcctccct

SEQ ID NO: 14662 - DNA, 13 bp, Artificial Sequence
  synthetic sequence
gtgtgattgcagc

SEQ ID NO: 14663 - DNA, 13 bp, Artificial Sequence
  synthetic sequence
cgctaatacgatc

SEQ ID NO: 14664 - DNA, 13 bp, Artificial Sequence
  synthetic sequence
gtaatgtatctgt

SEQ ID NO: 14665 - DNA, 13 bp, Artificial Sequence
  synthetic sequence
atgtaccagggat

SEQ ID NO: 14666 - DNA, 13 bp, Artificial Sequence
  synthetic sequence
gaagagtgcgtag

SEQ ID NO: 14667 - DNA, 13 bp, Artificial Sequence
  synthetic sequence
gctggtgaacagg

SEQ ID NO: 14668 - DNA, 13 bp, Artificial Sequence
  synthetic sequence
ggttcagcgtaag

SEQ ID NO: 14669 - DNA, 13 bp, Artificial Sequence
  synthetic sequence
ttgatgtactttc

SEQ ID NO: 14670 - DNA, 13 bp, Artificial Sequence
  synthetic sequence
gagcgggtgctat

SEQ ID NO: 14671 - DNA, 13 bp, Artificial Sequence
  synthetic sequence
atggtcgccggct

SEQ ID NO: 14672 - DNA, 13 bp, Artificial Sequence
  synthetic sequence
gcgtaccattgtt

SEQ ID NO: 14673 - DNA, 13 bp, Artificial Sequence
  synthetic sequence
tccactcgaaccg

SEQ ID NO: 14674 - DNA, 13 bp, Artificial Sequence
  synthetic sequence
gaccaccacgcac

SEQ ID NO: 14675 - DNA, 13 bp, Artificial Sequence
  synthetic sequence
tccctggcgatcg

SEQ ID NO: 14676 - DNA, 13 bp, Artificial Sequence
  synthetic sequence
tcgtccttgatca

SEQ ID NO: 14677 - DNA, 13 bp, Artificial Sequence
  synthetic sequence
gttcggtgaatat

SEQ ID NO: 14678 - DNA, 13 bp, Artificial Sequence
  synthetic sequence
caccacgcaaaag

SEQ ID NO: 14679 - DNA, 13 bp, Artificial Sequence
  synthetic sequence
tcgcgacctgaaa

SEQ ID NO: 14680 - DNA, 13 bp, Artificial Sequence
  synthetic sequence
cgtcgtgtgcgct

SEQ ID NO: 14681 - DNA, 13 bp, Artificial Sequence
  synthetic sequence
tgaaccatgggga

SEQ ID NO: 14682 - DNA, 13 bp, Artificial Sequence
  synthetic sequence
cagtgagtttatg

SEQ ID NO: 14683 - DNA, 13 bp, Artificial Sequence
  synthetic sequence
aaagcgtcttgcg

SEQ ID NO: 14684 - DNA, 13 bp, Artificial Sequence
  synthetic sequence
atcagtgataaag

SEQ ID NO: 14685 - DNA, 13 bp, Artificial Sequence
  synthetic sequence
agcaatcccgcca

SEQ ID NO: 14686 - DNA, 13 bp, Artificial Sequence
  synthetic sequence
aaaacggcgattt

SEQ ID NO: 14687 - DNA, 13 bp, Artificial Sequence
  synthetic sequence
ttatctggtgatc

SEQ ID NO: 14688 - DNA, 13 bp, Artificial Sequence
  synthetic sequence
tcacggcggattt

SEQ ID NO: 14689 - DNA, 13 bp, Artificial Sequence
  synthetic sequence
agcatcttttact

SEQ ID NO: 14690 - DNA, 13 bp, Artificial Sequence
  synthetic sequence
ttctgtttcaggc

SEQ ID NO: 14691 - DNA, 13 bp, Artificial Sequence
  synthetic sequence
gggtctgctcatt

SEQ ID NO: 14692 - DNA, 13 bp, Artificial Sequence
  synthetic sequence
gacctgcctcatc

SEQ ID NO: 14693 - DNA, 13 bp, Artificial Sequence
  synthetic sequence
tgcgcaatatccg

SEQ ID NO: 14694 - DNA, 13 bp, Artificial Sequence
  synthetic sequence
caaatgtaaagcg

SEQ ID NO: 14695 - DNA, 13 bp, Artificial Sequence
  synthetic sequence
ttagcttcaattc

SEQ ID NO: 14696 - DNA, 13 bp, Artificial Sequence
  synthetic sequence
acagcagactata

SEQ ID NO: 14697 - DNA, 13 bp, Artificial Sequence
  synthetic sequence
gtggtatcacgtg

SEQ ID NO: 14698 - DNA, 13 bp, Artificial Sequence
  synthetic sequence
cttttgagtcaat

SEQ ID NO: 14699 - DNA, 13 bp, Artificial Sequence
  synthetic sequence
ggttacccgcttc

SEQ ID NO: 14700 - DNA, 13 bp, Artificial Sequence
  synthetic sequence
tagaaatcctttg

SEQ ID NO: 14701 - DNA, 13 bp, Artificial Sequence
  synthetic sequence
accaattgttcca

SEQ ID NO: 14702 - DNA, 13 bp, Artificial Sequence
  synthetic sequence
cttcatccatcgc

SEQ ID NO: 14703 - DNA, 13 bp, Artificial Sequence
  synthetic sequence
cttgaagaaattc

SEQ ID NO: 14704 - DNA, 13 bp, Artificial Sequence
  synthetic sequence
cgctcatggagct

SEQ ID NO: 14705 - DNA, 13 bp, Artificial Sequence
  synthetic sequence
gtttattggctca

SEQ ID NO: 14706 - DNA, 13 bp, Artificial Sequence
  synthetic sequence
caacggaagcgtt

SEQ ID NO: 14707 - DNA, 13 bp, Artificial Sequence
  synthetic sequence
gatacatccccgg

SEQ ID NO: 14708 - DNA, 13 bp, Artificial Sequence
  synthetic sequence
gtagtgccactgg

SEQ ID NO: 14709 - DNA, 13 bp, Artificial Sequence
  synthetic sequence
tgtttccttttgc

SEQ ID NO: 14710 - DNA, 13 bp, Artificial Sequence
  synthetic sequence
ggacaaggcggta

SEQ ID NO: 14711 - DNA, 13 bp, Artificial Sequence
  synthetic sequence
aacctcggcgaga

SEQ ID NO: 14712 - DNA, 13 bp, Artificial Sequence
  synthetic sequence
ctctatatcttca

SEQ ID NO: 14713 - DNA, 13 bp, Artificial Sequence
  synthetic sequence
tgcctatagagta

SEQ ID NO: 14714 - DNA, 13 bp, Artificial Sequence
  synthetic sequence
gacgccgaactcg

SEQ ID NO: 14715 - DNA, 13 bp, Artificial Sequence
  synthetic sequence
ctcattgagcacc

SEQ ID NO: 14716 - DNA, 13 bp, Artificial Sequence
  synthetic sequence
tcgtggtattcac

SEQ ID NO: 14717 - DNA, 13 bp, Artificial Sequence
  synthetic sequence
tacagcaactcga

SEQ ID NO: 14718 - DNA, 13 bp, Artificial Sequence
  synthetic sequence
cagcgggaactgg

SEQ ID NO: 14719 - DNA, 13 bp, Artificial Sequence
  synthetic sequence
gtatgaccttgga

SEQ ID NO: 14720 - DNA, 13 bp, Artificial Sequence
  synthetic sequence
tggttttgccgga

SEQ ID NO: 14721 - DNA, 13 bp, Artificial Sequence
  synthetic sequence
aagaggaaagttc

SEQ ID NO: 14722 - DNA, 13 bp, Artificial Sequence
  synthetic sequence
aaaatgtgttttc

SEQ ID NO: 14723 - DNA, 13 bp, Artificial Sequence
  synthetic sequence
acaacgtctggac

SEQ ID NO: 14724 - DNA, 13 bp, Artificial Sequence
  synthetic sequence
taatcgttataac

SEQ ID NO: 14725 - DNA, 13 bp, Artificial Sequence
  synthetic sequence
tcgaggccaccct

SEQ ID NO: 14726 - DNA, 13 bp, Artificial Sequence
  synthetic sequence
tgccattcttcga

SEQ ID NO: 14727 - DNA, 13 bp, Artificial Sequence
  synthetic sequence
cggcttgagcgct

SEQ ID NO: 14728 - DNA, 13 bp, Artificial Sequence
  synthetic sequence
cttgataccttag

SEQ ID NO: 14729 - DNA, 13 bp, Artificial Sequence
  synthetic sequence
agtatgaaatact

SEQ ID NO: 14730 - DNA, 13 bp, Artificial Sequence
  synthetic sequence
tatgtgggagaaa

SEQ ID NO: 14731 - DNA, 13 bp, Artificial Sequence
  synthetic sequence
tcgtggtaatgcc

SEQ ID NO: 14732 - DNA, 13 bp, Artificial Sequence
  synthetic sequence
gcagtctttgtgc

SEQ ID NO: 14733 - DNA, 13 bp, Artificial Sequence
  synthetic sequence
tctcgggcatcca

SEQ ID NO: 14734 - DNA, 13 bp, Artificial Sequence
  synthetic sequence
acttctataaggt

SEQ ID NO: 14735 - DNA, 13 bp, Artificial Sequence
  synthetic sequence
gtcaccattgttg

SEQ ID NO: 14736 - DNA, 13 bp, Artificial Sequence
  synthetic sequence
gaacgtcgaaagc

SEQ ID NO: 14737 - DNA, 13 bp, Artificial Sequence
  synthetic sequence
tcctgatcgccag

SEQ ID NO: 14738 - DNA, 13 bp, Artificial Sequence
  synthetic sequence
tcatctggaaatg

SEQ ID NO: 14739 - DNA, 13 bp, Artificial Sequence
  synthetic sequence
gctggtattagct

SEQ ID NO: 14740 - DNA, 13 bp, Artificial Sequence
  synthetic sequence
gcgaagcatcctg

SEQ ID NO: 14741 - DNA, 13 bp, Artificial Sequence
  synthetic sequence
tctacagccttga

SEQ ID NO: 14742 - DNA, 13 bp, Artificial Sequence
  synthetic sequence
tcggcatcgtgca

SEQ ID NO: 14743 - DNA, 13 bp, Artificial Sequence
  synthetic sequence
acatcgggtattt

SEQ ID NO: 14744 - DNA, 13 bp, Artificial Sequence
  synthetic sequence
cttttcgtttcat

SEQ ID NO: 14745 - DNA, 13 bp, Artificial Sequence
  synthetic sequence
ggtctggctgcta

SEQ ID NO: 14746 - DNA, 13 bp, Artificial Sequence
  synthetic sequence
cgatgacctggac

SEQ ID NO: 14747 - DNA, 13 bp, Artificial Sequence
  synthetic sequence
aagtatggtctat

SEQ ID NO: 14748 - DNA, 13 bp, Artificial Sequence
  synthetic sequence
acaaacatcggat

SEQ ID NO: 14749 - DNA, 13 bp, Artificial Sequence
  synthetic sequence
ccaccacaaagaa

SEQ ID NO: 14750 - DNA, 13 bp, Artificial Sequence
  synthetic sequence
ggccatgacggtg

SEQ ID NO: 14751 - DNA, 13 bp, Artificial Sequence
  synthetic sequence
tggccgaggcgat

SEQ ID NO: 14752 - DNA, 13 bp, Artificial Sequence
  synthetic sequence
cgaaagcccattc

SEQ ID NO: 14753 - DNA, 13 bp, Artificial Sequence
  synthetic sequence
ttccagcatccgg

SEQ ID NO: 14754 - DNA, 13 bp, Artificial Sequence
  synthetic sequence
tcaggacaatgct

SEQ ID NO: 14755 - DNA, 13 bp, Artificial Sequence
  synthetic sequence
tgttcaatctact

SEQ ID NO: 14756 - DNA, 13 bp, Artificial Sequence
  synthetic sequence
gtcagcagggtct

SEQ ID NO: 14757 - DNA, 13 bp, Artificial Sequence
  synthetic sequence
tacctagctatag

SEQ ID NO: 14758 - DNA, 13 bp, Artificial Sequence
  synthetic sequence
agatagataaggc

SEQ ID NO: 14759 - DNA, 13 bp, Artificial Sequence
  synthetic sequence
accgacagagcgg

SEQ ID NO: 14760 - DNA, 13 bp, Artificial Sequence
  synthetic sequence
atccaaagcgcac

SEQ ID NO: 14761 - DNA, 13 bp, Artificial Sequence
  synthetic sequence
gcaacgatgtctg

SEQ ID NO: 14762 - DNA, 13 bp, Artificial Sequence
  synthetic sequence
agcatcccgacct

SEQ ID NO: 14763 - DNA, 13 bp, Artificial Sequence
  synthetic sequence
gacgtttatcccc

SEQ ID NO: 14764 - DNA, 13 bp, Artificial Sequence
  synthetic sequence
tttgggtcaagtt

SEQ ID NO: 14765 - DNA, 13 bp, Artificial Sequence
  synthetic sequence
aagatttcttgtt

SEQ ID NO: 14766 - DNA, 13 bp, Artificial Sequence
  synthetic sequence
agggcttttactg

SEQ ID NO: 14767 - DNA, 13 bp, Artificial Sequence
  synthetic sequence
tcggccttctgcg

SEQ ID NO: 14768 - DNA, 13 bp, Artificial Sequence
  synthetic sequence
ttctcacggaatc

SEQ ID NO: 14769 - DNA, 13 bp, Artificial Sequence
  synthetic sequence
caggcgcgacgaa

SEQ ID NO: 14770 - DNA, 13 bp, Artificial Sequence
  synthetic sequence
agactatcgttaa

SEQ ID NO: 14771 - DNA, 13 bp, Artificial Sequence
  synthetic sequence
acctatctgcagg

SEQ ID NO: 14772 - DNA, 13 bp, Artificial Sequence
  synthetic sequence
atgctgtccgtgt

SEQ ID NO: 14773 - DNA, 13 bp, Artificial Sequence
  synthetic sequence
atctgtttagcta

SEQ ID NO: 14774 - DNA, 13 bp, Artificial Sequence
  synthetic sequence
gttcgctcccgct

SEQ ID NO: 14775 - DNA, 13 bp, Artificial Sequence
  synthetic sequence
tccgcgacaatgg

SEQ ID NO: 14776 - DNA, 13 bp, Artificial Sequence
  synthetic sequence
cgaataccgttcc

SEQ ID NO: 14777 - DNA, 13 bp, Artificial Sequence
  synthetic sequence
ccatgccgatggg

SEQ ID NO: 14778 - DNA, 13 bp, Artificial Sequence
  synthetic sequence
aatgcgcagttgc

SEQ ID NO: 14779 - DNA, 13 bp, Artificial Sequence
  synthetic sequence
ttcctccaatcgg

SEQ ID NO: 14780 - DNA, 13 bp, Artificial Sequence
  synthetic sequence
gccatctgattga

SEQ ID NO: 14781 - DNA, 13 bp, Artificial Sequence
  synthetic sequence
taaacccgctgtc

SEQ ID NO: 14782 - DNA, 13 bp, Artificial Sequence
  synthetic sequence
atcgtaaaagtct

SEQ ID NO: 14783 - DNA, 13 bp, Artificial Sequence
  synthetic sequence
atgttcaatatca

SEQ ID NO: 14784 - DNA, 13 bp, Artificial Sequence
  synthetic sequence
ctcaactatcaga

SEQ ID NO: 14785 - DNA, 13 bp, Artificial Sequence
  synthetic sequence
tcaatgtcatttt

SEQ ID NO: 14786 - DNA, 13 bp, Artificial Sequence
  synthetic sequence
gcagcgtgaggat

SEQ ID NO: 14787 - DNA, 13 bp, Artificial Sequence
  synthetic sequence
cgttaagctgctg

SEQ ID NO: 14788 - DNA, 13 bp, Artificial Sequence
  synthetic sequence
ggtaactatattt

SEQ ID NO: 14789 - DNA, 13 bp, Artificial Sequence
  synthetic sequence
ttcccggtggtat

SEQ ID NO: 14790 - DNA, 13 bp, Artificial Sequence
  synthetic sequence
tgtccatgcaagc

SEQ ID NO: 14791 - DNA, 13 bp, Artificial Sequence
  synthetic sequence
tatctccgggatc

SEQ ID NO: 14792 - DNA, 13 bp, Artificial Sequence
  synthetic sequence
gagaacccaaagg

SEQ ID NO: 14793 - DNA, 13 bp, Artificial Sequence
  synthetic sequence
aacctcaaggtgt

SEQ ID NO: 14794 - DNA, 13 bp, Artificial Sequence
  synthetic sequence
tccggcacgttgc

SEQ ID NO: 14795 - DNA, 13 bp, Artificial Sequence
  synthetic sequence
atattccttacca

SEQ ID NO: 14796 - DNA, 13 bp, Artificial Sequence
  synthetic sequence
aatctacgctgat

SEQ ID NO: 14797 - DNA, 13 bp, Artificial Sequence
  synthetic sequence
ggcgggatcaacc

SEQ ID NO: 14798 - DNA, 13 bp, Artificial Sequence
  synthetic sequence
cgaggccatcgag

SEQ ID NO: 14799 - DNA, 13 bp, Artificial Sequence
  synthetic sequence
aacatgatattgc

SEQ ID NO: 14800 - DNA, 13 bp, Artificial Sequence
  synthetic sequence
agtaagtcaacaa

SEQ ID NO: 14801 - DNA, 13 bp, Artificial Sequence
  synthetic sequence
gccacggtcggtt

SEQ ID NO: 14802 - DNA, 13 bp, Artificial Sequence
  synthetic sequence
ggtcttcgtaagc

SEQ ID NO: 14803 - DNA, 13 bp, Artificial Sequence
  synthetic sequence
attgaccgagcat

SEQ ID NO: 14804 - DNA, 13 bp, Artificial Sequence
  synthetic sequence
atagtgtggcata

SEQ ID NO: 14805 - DNA, 13 bp, Artificial Sequence
  synthetic sequence
ggaacaagcaata

SEQ ID NO: 14806 - DNA, 13 bp, Artificial Sequence
  synthetic sequence
agttcagggactt

SEQ ID NO: 14807 - DNA, 13 bp, Artificial Sequence
  synthetic sequence
attatcagttaga

SEQ ID NO: 14808 - DNA, 13 bp, Artificial Sequence
  synthetic sequence
ctcctgtctcctt

SEQ ID NO: 14809 - DNA, 13 bp, Artificial Sequence
  synthetic sequence
cagtcatcccact

SEQ ID NO: 14810 - DNA, 13 bp, Artificial Sequence
  synthetic sequence
atcgcagggaaca

SEQ ID NO: 14811 - DNA, 13 bp, Artificial Sequence
  synthetic sequence
atcgacaacacgg

SEQ ID NO: 14812 - DNA, 13 bp, Artificial Sequence
  synthetic sequence
gaccttcctcctc

SEQ ID NO: 14813 - DNA, 13 bp, Artificial Sequence
  synthetic sequence
tgcggcgcaattg

SEQ ID NO: 14814 - DNA, 13 bp, Artificial Sequence
  synthetic sequence
agcttccaggccg

SEQ ID NO: 14815 - DNA, 13 bp, Artificial Sequence
  synthetic sequence
gcaattcggggag

SEQ ID NO: 14816 - DNA, 13 bp, Artificial Sequence
  synthetic sequence
agaacatctacga

SEQ ID NO: 14817 - DNA, 13 bp, Artificial Sequence
  synthetic sequence
aaagcgaaactgg

SEQ ID NO: 14818 - DNA, 13 bp, Artificial Sequence
  synthetic sequence
ccagcggcacgaa

SEQ ID NO: 14819 - DNA, 13 bp, Artificial Sequence
  synthetic sequence
gcggccgtagttt

SEQ ID NO: 14820 - DNA, 13 bp, Artificial Sequence
  synthetic sequence
gaagcctgctccg

SEQ ID NO: 14821 - DNA, 13 bp, Artificial Sequence
  synthetic sequence
cttgtggtgcctc

SEQ ID NO: 14822 - DNA, 13 bp, Artificial Sequence
  synthetic sequence
caaggcgctattt

SEQ ID NO: 14823 - DNA, 13 bp, Artificial Sequence
  synthetic sequence
ggatcgcttctcg

SEQ ID NO: 14824 - DNA, 13 bp, Artificial Sequence
  synthetic sequence
accaccatcgaca

SEQ ID NO: 14825 - DNA, 13 bp, Artificial Sequence
  synthetic sequence
gctgaagttggat

SEQ ID NO: 14826 - DNA, 13 bp, Artificial Sequence
  synthetic sequence
ccaacaattggtt

SEQ ID NO: 14827 - DNA, 13 bp, Artificial Sequence
  synthetic sequence
cgaggaagttggg

SEQ ID NO: 14828 - DNA, 13 bp, Artificial Sequence
  synthetic sequence
ccctcgccaatgc

SEQ ID NO: 14829 - DNA, 13 bp, Artificial Sequence
  synthetic sequence
ctggatgcggcca

SEQ ID NO: 14830 - DNA, 13 bp, Artificial Sequence
  synthetic sequence
gttatgtggtggc

SEQ ID NO: 14831 - DNA, 13 bp, Artificial Sequence
  synthetic sequence
acgcgcgtcaacc

SEQ ID NO: 14832 - DNA, 13 bp, Artificial Sequence
  synthetic sequence
tttaggtgtggtt

SEQ ID NO: 14833 - DNA, 13 bp, Artificial Sequence
  synthetic sequence
atatcggtgatta

SEQ ID NO: 14834 - DNA, 13 bp, Artificial Sequence
  synthetic sequence
acttcaagcagtg

SEQ ID NO: 14835 - DNA, 13 bp, Artificial Sequence
  synthetic sequence
accccagcatagg

SEQ ID NO: 14836 - DNA, 13 bp, Artificial Sequence
  synthetic sequence
gcccgaaagtttt

SEQ ID NO: 14837 - DNA, 13 bp, Artificial Sequence
  synthetic sequence
cgtcaatgggcct

SEQ ID NO: 14838 - DNA, 13 bp, Artificial Sequence
  synthetic sequence
aaatcaactcaga

SEQ ID NO: 14839 - DNA, 13 bp, Artificial Sequence
  synthetic sequence
gccgtcacgaaca

SEQ ID NO: 14840 - DNA, 13 bp, Artificial Sequence
  synthetic sequence
gcatgaccgtcat

SEQ ID NO: 14841 - DNA, 13 bp, Artificial Sequence
  synthetic sequence
aaacaaccagatt

SEQ ID NO: 14842 - DNA, 13 bp, Artificial Sequence
  synthetic sequence
caggtaaccaatc

SEQ ID NO: 14843 - DNA, 13 bp, Artificial Sequence
  synthetic sequence
gtgcttttcaagc

SEQ ID NO: 14844 - DNA, 13 bp, Artificial Sequence
  synthetic sequence
gtgagaatgttac

SEQ ID NO: 14845 - DNA, 13 bp, Artificial Sequence
  synthetic sequence
caaacactggaaa

SEQ ID NO: 14846 - DNA, 13 bp, Artificial Sequence
  synthetic sequence
cacaggattgagt

SEQ ID NO: 14847 - DNA, 13 bp, Artificial Sequence
  synthetic sequence
tcaatggttcgtc

SEQ ID NO: 14848 - DNA, 13 bp, Artificial Sequence
  synthetic sequence
gcgccgcttcgtt

SEQ ID NO: 14849 - DNA, 13 bp, Artificial Sequence
  synthetic sequence
cattgatgaaggt

SEQ ID NO: 14850 - DNA, 13 bp, Artificial Sequence
  synthetic sequence
acttttagttgga

SEQ ID NO: 14851 - DNA, 13 bp, Artificial Sequence
  synthetic sequence
gttacagcttatg

SEQ ID NO: 14852 - DNA, 13 bp, Artificial Sequence
  synthetic sequence
gccacattggagc

SEQ ID NO: 14853 - DNA, 13 bp, Artificial Sequence
  synthetic sequence
cttcctcagttag

SEQ ID NO: 14854 - DNA, 13 bp, Artificial Sequence
  synthetic sequence
ctaacagtgcaga

SEQ ID NO: 14855 - DNA, 13 bp, Artificial Sequence
  synthetic sequence
cttcgcttttacg

SEQ ID NO: 14856 - DNA, 13 bp, Artificial Sequence
  synthetic sequence
gatatccaaggat

SEQ ID NO: 14857 - DNA, 13 bp, Artificial Sequence
  synthetic sequence
tactgtgttgatc

SEQ ID NO: 14858 - DNA, 13 bp, Artificial Sequence
  synthetic sequence
ataagacgtatcg

SEQ ID NO: 14859 - DNA, 13 bp, Artificial Sequence
  synthetic sequence
ggaaataatcagc

SEQ ID NO: 14860 - DNA, 13 bp, Artificial Sequence
  synthetic sequence
tccatcgacggta

SEQ ID NO: 14861 - DNA, 13 bp, Artificial Sequence
  synthetic sequence
cgatgccttgccc

SEQ ID NO: 14862 - DNA, 13 bp, Artificial Sequence
  synthetic sequence
caaacatgaaagc

SEQ ID NO: 14863 - DNA, 13 bp, Artificial Sequence
  synthetic sequence
ttggcgatgcatc

SEQ ID NO: 14864 - DNA, 13 bp, Artificial Sequence
  synthetic sequence
agcatccggatca

SEQ ID NO: 14865 - DNA, 13 bp, Artificial Sequence
  synthetic sequence
aggcacagaacac

SEQ ID NO: 14866 - DNA, 13 bp, Artificial Sequence
  synthetic sequence
tgctcgctggtct

SEQ ID NO: 14867 - DNA, 13 bp, Artificial Sequence
  synthetic sequence
ggcggttgaaggg

SEQ ID NO: 14868 - DNA, 13 bp, Artificial Sequence
  synthetic sequence
taattcttcaacg

SEQ ID NO: 14869 - DNA, 13 bp, Artificial Sequence
  synthetic sequence
cacgccgattaac

SEQ ID NO: 14870 - DNA, 13 bp, Artificial Sequence
  synthetic sequence
ctcttgcacactc

SEQ ID NO: 14871 - DNA, 13 bp, Artificial Sequence
  synthetic sequence
cttccggcaccga

SEQ ID NO: 14872 - DNA, 13 bp, Artificial Sequence
  synthetic sequence
ctgagcctgacgg

SEQ ID NO: 14873 - DNA, 13 bp, Artificial Sequence
  synthetic sequence
ttgaagtgttggc

SEQ ID NO: 14874 - DNA, 13 bp, Artificial Sequence
  synthetic sequence
tcagcacgcccag

SEQ ID NO: 14875 - DNA, 13 bp, Artificial Sequence
  synthetic sequence
ctgccgccgatct

SEQ ID NO: 14876 - DNA, 13 bp, Artificial Sequence
  synthetic sequence
ctgaacattattc

SEQ ID NO: 14877 - DNA, 13 bp, Artificial Sequence
  synthetic sequence
agagttgatggcg

SEQ ID NO: 14878 - DNA, 13 bp, Artificial Sequence
  synthetic sequence
tgttgcgtttcgt

SEQ ID NO: 14879 - DNA, 13 bp, Artificial Sequence
  synthetic sequence
acggttttggttt

SEQ ID NO: 14880 - DNA, 13 bp, Artificial Sequence
  synthetic sequence
cacaatgggtatc

SEQ ID NO: 14881 - DNA, 13 bp, Artificial Sequence
  synthetic sequence
ggtgtggctttgg

SEQ ID NO: 14882 - DNA, 13 bp, Artificial Sequence
  synthetic sequence
tttggccgatagc

SEQ ID NO: 14883 - DNA, 13 bp, Artificial Sequence
  synthetic sequence
gaggatattgggt

SEQ ID NO: 14884 - DNA, 13 bp, Artificial Sequence
  synthetic sequence
caagcgcttctct

SEQ ID NO: 14885 - DNA, 13 bp, Artificial Sequence
  synthetic sequence
tttgtgaagctgt

SEQ ID NO: 14886 - DNA, 13 bp, Artificial Sequence
  synthetic sequence
atccagaccgcta

SEQ ID NO: 14887 - DNA, 13 bp, Artificial Sequence
  synthetic sequence
ttcgatgctgtcc

SEQ ID NO: 14888 - DNA, 13 bp, Artificial Sequence
  synthetic sequence
attccagccttcc

SEQ ID NO: 14889 - DNA, 13 bp, Artificial Sequence
  synthetic sequence
catcaaggtctca

SEQ ID NO: 14890 - DNA, 13 bp, Artificial Sequence
  synthetic sequence
tggtggtagtgcg

SEQ ID NO: 14891 - DNA, 13 bp, Artificial Sequence
  synthetic sequence
aatggaaatacta

SEQ ID NO: 14892 - DNA, 13 bp, Artificial Sequence
  synthetic sequence
agcacgacaatag

SEQ ID NO: 14893 - DNA, 13 bp, Artificial Sequence
  synthetic sequence
gctagttaacgat

SEQ ID NO: 14894 - DNA, 13 bp, Artificial Sequence
  synthetic sequence
aggtacgcgaccg

SEQ ID NO: 14895 - DNA, 13 bp, Artificial Sequence
  synthetic sequence
ggagtactactcc

SEQ ID NO: 14896 - DNA, 13 bp, Artificial Sequence
  synthetic sequence
atgaaaacgaaca

SEQ ID NO: 14897 - DNA, 13 bp, Artificial Sequence
  synthetic sequence
ccttcggcggtag

SEQ ID NO: 14898 - DNA, 13 bp, Artificial Sequence
  synthetic sequence
agccggaattctg

SEQ ID NO: 14899 - DNA, 13 bp, Artificial Sequence
  synthetic sequence
cgtttgattatat

SEQ ID NO: 14900 - DNA, 13 bp, Artificial Sequence
  synthetic sequence
cacccacaacttg

SEQ ID NO: 14901 - DNA, 13 bp, Artificial Sequence
  synthetic sequence
agcgctacgcaac

SEQ ID NO: 14902 - DNA, 13 bp, Artificial Sequence
  synthetic sequence
aactggcagatgc

SEQ ID NO: 14903 - DNA, 13 bp, Artificial Sequence
  synthetic sequence
taaagtcgcttag

SEQ ID NO: 14904 - DNA, 13 bp, Artificial Sequence
  synthetic sequence
ggcagtcgaagag

SEQ ID NO: 14905 - DNA, 13 bp, Artificial Sequence
  synthetic sequence
accctgctgccca

SEQ ID NO: 14906 - DNA, 13 bp, Artificial Sequence
  synthetic sequence
gaaagtgccctac

SEQ ID NO: 14907 - DNA, 13 bp, Artificial Sequence
  synthetic sequence
acaccctggtgaa

SEQ ID NO: 14908 - DNA, 13 bp, Artificial Sequence
  synthetic sequence
tgaagaacacctt

SEQ ID NO: 14909 - DNA, 13 bp, Artificial Sequence
  synthetic sequence
caggtttagtcat

SEQ ID NO: 14910 - DNA, 13 bp, Artificial Sequence
  synthetic sequence
gggaggatggtgc

SEQ ID NO: 14911 - DNA, 13 bp, Artificial Sequence
  synthetic sequence
gatttccctcgcc

SEQ ID NO: 14912 - DNA, 13 bp, Artificial Sequence
  synthetic sequence
aagttttgtctgg

SEQ ID NO: 14913 - DNA, 13 bp, Artificial Sequence
  synthetic sequence
aacggattcttca

SEQ ID NO: 14914 - DNA, 13 bp, Artificial Sequence
  synthetic sequence
tgcagagaaaagt

SEQ ID NO: 14915 - DNA, 13 bp, Artificial Sequence
  synthetic sequence
agtattactgcag

SEQ ID NO: 14916 - DNA, 13 bp, Artificial Sequence
  synthetic sequence
ttggaggaaattc

SEQ ID NO: 14917 - DNA, 13 bp, Artificial Sequence
  synthetic sequence
atcagcatcaaag

SEQ ID NO: 14918 - DNA, 13 bp, Artificial Sequence
  synthetic sequence
gcggaaggcaata

SEQ ID NO: 14919 - DNA, 13 bp, Artificial Sequence
  synthetic sequence
tcggagaagatgg

SEQ ID NO: 14920 - DNA, 13 bp, Artificial Sequence
  synthetic sequence
tggcggaacgctc

SEQ ID NO: 14921 - DNA, 13 bp, Artificial Sequence
  synthetic sequence
aggcgtcccaact

SEQ ID NO: 14922 - DNA, 13 bp, Artificial Sequence
  synthetic sequence
agacgaaatggag

SEQ ID NO: 14923 - DNA, 13 bp, Artificial Sequence
  synthetic sequence
ttcagctggattt

SEQ ID NO: 14924 - DNA, 13 bp, Artificial Sequence
  synthetic sequence
gaatcaggtcatc

SEQ ID NO: 14925 - DNA, 13 bp, Artificial Sequence
  synthetic sequence
acgctggtcaagg

SEQ ID NO: 14926 - DNA, 13 bp, Artificial Sequence
  synthetic sequence
ctaatcctaatct

SEQ ID NO: 14927 - DNA, 13 bp, Artificial Sequence
  synthetic sequence
tcatggatggcga

SEQ ID NO: 14928 - DNA, 13 bp, Artificial Sequence
  synthetic sequence
tgattggattaaa

SEQ ID NO: 14929 - DNA, 13 bp, Artificial Sequence
  synthetic sequence
tgagcaatttgat

SEQ ID NO: 14930 - DNA, 13 bp, Artificial Sequence
  synthetic sequence
gtggctcgttggc

SEQ ID NO: 14931 - DNA, 13 bp, Artificial Sequence
  synthetic sequence
ctaccagggaccc

SEQ ID NO: 14932 - DNA, 13 bp, Artificial Sequence
  synthetic sequence
gcagttccattga

SEQ ID NO: 14933 - DNA, 13 bp, Artificial Sequence
  synthetic sequence
tagctctgcatga

SEQ ID NO: 14934 - DNA, 13 bp, Artificial Sequence
  synthetic sequence
agctaggatcggt

SEQ ID NO: 14935 - DNA, 13 bp, Artificial Sequence
  synthetic sequence
gaaaagcacctta

SEQ ID NO: 14936 - DNA, 13 bp, Artificial Sequence
  synthetic sequence
gtaggaagcaata

SEQ ID NO: 14937 - DNA, 13 bp, Artificial Sequence
  synthetic sequence
cctttgaagatgg

SEQ ID NO: 14938 - DNA, 13 bp, Artificial Sequence
  synthetic sequence
aaccaagatcaaa

SEQ ID NO: 14939 - DNA, 13 bp, Artificial Sequence
  synthetic sequence
ggcgaaggacaac

SEQ ID NO: 14940 - DNA, 13 bp, Artificial Sequence
  synthetic sequence
ctggcgcgtactc

SEQ ID NO: 14941 - DNA, 13 bp, Artificial Sequence
  synthetic sequence
ccgcacatagcac

SEQ ID NO: 14942 - DNA, 13 bp, Artificial Sequence
  synthetic sequence
caggtttactgcg

SEQ ID NO: 14943 - DNA, 13 bp, Artificial Sequence
  synthetic sequence
gggctaaattgcc

SEQ ID NO: 14944 - DNA, 13 bp, Artificial Sequence
  synthetic sequence
gattcatcaacat

SEQ ID NO: 14945 - DNA, 13 bp, Artificial Sequence
  synthetic sequence
gacgcttgctgct

SEQ ID NO: 14946 - DNA, 13 bp, Artificial Sequence
  synthetic sequence
gttgctgctgctc

SEQ ID NO: 14947 - DNA, 13 bp, Artificial Sequence
  synthetic sequence
ggatctagaatat

SEQ ID NO: 14948 - DNA, 13 bp, Artificial Sequence
  synthetic sequence
ccttggtcagcac

SEQ ID NO: 14949 - DNA, 13 bp, Artificial Sequence
  synthetic sequence
gggttgggcttcg

SEQ ID NO: 14950 - DNA, 13 bp, Artificial Sequence
  synthetic sequence
aatccacatcggc

SEQ ID NO: 14951 - DNA, 13 bp, Artificial Sequence
  synthetic sequence
tgtcctgcgccac

SEQ ID NO: 14952 - DNA, 13 bp, Artificial Sequence
  synthetic sequence
cgctctggagtga

SEQ ID NO: 14953 - DNA, 13 bp, Artificial Sequence
  synthetic sequence
cttcagcgatgaa

SEQ ID NO: 14954 - DNA, 13 bp, Artificial Sequence
  synthetic sequence
ccgaccaacattg

SEQ ID NO: 14955 - DNA, 13 bp, Artificial Sequence
  synthetic sequence
tcgcgttaagcgg

SEQ ID NO: 14956 - DNA, 13 bp, Artificial Sequence
  synthetic sequence
atcgcgcgctcac

SEQ ID NO: 14957 - DNA, 13 bp, Artificial Sequence
  synthetic sequence
caatcagtaatgc

SEQ ID NO: 14958 - DNA, 13 bp, Artificial Sequence
  synthetic sequence
gtatattggttgt

SEQ ID NO: 14959 - DNA, 13 bp, Artificial Sequence
  synthetic sequence
ctcggcaagatgc

SEQ ID NO: 14960 - DNA, 13 bp, Artificial Sequence
  synthetic sequence
aagaattaattgc

SEQ ID NO: 14961 - DNA, 13 bp, Artificial Sequence
  synthetic sequence
cactcagttcgcc

SEQ ID NO: 14962 - DNA, 13 bp, Artificial Sequence
  synthetic sequence
catggtgtcgaac

SEQ ID NO: 14963 - DNA, 13 bp, Artificial Sequence
  synthetic sequence
ttttcaggcagcg

SEQ ID NO: 14964 - DNA, 13 bp, Artificial Sequence
  synthetic sequence
tggcgaactcgac

SEQ ID NO: 14965 - DNA, 13 bp, Artificial Sequence
  synthetic sequence
tatgacgatagca

SEQ ID NO: 14966 - DNA, 13 bp, Artificial Sequence
  synthetic sequence
catgcagaactcg

SEQ ID NO: 14967 - DNA, 13 bp, Artificial Sequence
  synthetic sequence
tgtttcttcaact

SEQ ID NO: 14968 - DNA, 13 bp, Artificial Sequence
  synthetic sequence
gacgagctggcca

SEQ ID NO: 14969 - DNA, 13 bp, Artificial Sequence
  synthetic sequence
tgttgcaacgcct

SEQ ID NO: 14970 - DNA, 13 bp, Artificial Sequence
  synthetic sequence
ctgtcggcgaacc

SEQ ID NO: 14971 - DNA, 13 bp, Artificial Sequence
  synthetic sequence
cacgcaaaatttt

SEQ ID NO: 14972 - DNA, 13 bp, Artificial Sequence
  synthetic sequence
ttcgaaccgctat

SEQ ID NO: 14973 - DNA, 13 bp, Artificial Sequence
  synthetic sequence
ttcctggttctct

SEQ ID NO: 14974 - DNA, 13 bp, Artificial Sequence
  synthetic sequence
tgaatgcttcaag

SEQ ID NO: 14975 - DNA, 13 bp, Artificial Sequence
  synthetic sequence
gttcgtggctgat

SEQ ID NO: 14976 - DNA, 13 bp, Artificial Sequence
  synthetic sequence
aatattagtactg

SEQ ID NO: 14977 - DNA, 13 bp, Artificial Sequence
  synthetic sequence
aaattgttgtcgg

SEQ ID NO: 14978 - DNA, 13 bp, Artificial Sequence
  synthetic sequence
acgatgttgtctc

SEQ ID NO: 14979 - DNA, 13 bp, Artificial Sequence
  synthetic sequence
gggtgtcaggctg

SEQ ID NO: 14980 - DNA, 13 bp, Artificial Sequence
  synthetic sequence
tgttgcaacagct

SEQ ID NO: 14981 - DNA, 13 bp, Artificial Sequence
  synthetic sequence
tggtatcagcctg

SEQ ID NO: 14982 - DNA, 13 bp, Artificial Sequence
  synthetic sequence
gtacaggttcaaa

SEQ ID NO: 14983 - DNA, 13 bp, Artificial Sequence
  synthetic sequence
tgctgggtcacgg

SEQ ID NO: 14984 - DNA, 13 bp, Artificial Sequence
  synthetic sequence
gtacacgtttcgc

SEQ ID NO: 14985 - DNA, 13 bp, Artificial Sequence
  synthetic sequence
accagactcgtcg

SEQ ID NO: 14986 - DNA, 13 bp, Artificial Sequence
  synthetic sequence
tacaagtactttt

SEQ ID NO: 14987 - DNA, 13 bp, Artificial Sequence
  synthetic sequence
caatgatgaaaga

SEQ ID NO: 14988 - DNA, 13 bp, Artificial Sequence
  synthetic sequence
ggcttaatacaaa

SEQ ID NO: 14989 - DNA, 13 bp, Artificial Sequence
  synthetic sequence
atcaattgatgac

SEQ ID NO: 14990 - DNA, 13 bp, Artificial Sequence
  synthetic sequence
ccttctacaattt

SEQ ID NO: 14991 - DNA, 13 bp, Artificial Sequence
  synthetic sequence
taccaccgtgacc

SEQ ID NO: 14992 - DNA, 13 bp, Artificial Sequence
  synthetic sequence
gaacgaccagatt

SEQ ID NO: 14993 - DNA, 13 bp, Artificial Sequence
  synthetic sequence
tactttgtctatt

SEQ ID NO: 14994 - DNA, 13 bp, Artificial Sequence
  synthetic sequence
caccaggtgaaat

SEQ ID NO: 14995 - DNA, 13 bp, Artificial Sequence
  synthetic sequence
gcagaacttgaaa

SEQ ID NO: 14996 - DNA, 13 bp, Artificial Sequence
  synthetic sequence
agtagtcgcttca

SEQ ID NO: 14997 - DNA, 13 bp, Artificial Sequence
  synthetic sequence
tacttaacgagtg

SEQ ID NO: 14998 - DNA, 13 bp, Artificial Sequence
  synthetic sequence
ggcaatgccagac

SEQ ID NO: 14999 - DNA, 13 bp, Artificial Sequence
  synthetic sequence
aaaccaggctttt

SEQ ID NO: 15000 - DNA, 13 bp, Artificial Sequence
  synthetic sequence
cgaaagtacgcgt

SEQ ID NO: 15001 - DNA, 13 bp, Artificial Sequence
  synthetic sequence
caatcttttcgca

SEQ ID NO: 15002 - DNA, 13 bp, Artificial Sequence
  synthetic sequence
attttgcccagga

SEQ ID NO: 15003 - DNA, 13 bp, Artificial Sequence
  synthetic sequence
cgaacaaaccgat

SEQ ID NO: 15004 - DNA, 13 bp, Artificial Sequence
  synthetic sequence
cggcagcaagaag

SEQ ID NO: 15005 - DNA, 13 bp, Artificial Sequence
  synthetic sequence
gtattgcactagg

SEQ ID NO: 15006 - DNA, 13 bp, Artificial Sequence
  synthetic sequence
tagcgatacaaat

SEQ ID NO: 15007 - DNA, 13 bp, Artificial Sequence
  synthetic sequence
cctggattaccgt

SEQ ID NO: 15008 - DNA, 13 bp, Artificial Sequence
  synthetic sequence
gagatcgatccag

SEQ ID NO: 15009 - DNA, 13 bp, Artificial Sequence
  synthetic sequence
aaacgatgcccat

SEQ ID NO: 15010 - DNA, 13 bp, Artificial Sequence
  synthetic sequence
attacgatatgcg

SEQ ID NO: 15011 - DNA, 13 bp, Artificial Sequence
  synthetic sequence
ttcaagaatgcgc

SEQ ID NO: 15012 - DNA, 13 bp, Artificial Sequence
  synthetic sequence
cgatgacggcctc

SEQ ID NO: 15013 - DNA, 13 bp, Artificial Sequence
  synthetic sequence
gattgccgacggc

SEQ ID NO: 15014 - DNA, 13 bp, Artificial Sequence
  synthetic sequence
accaaagacaaaa

SEQ ID NO: 15015 - DNA, 13 bp, Artificial Sequence
  synthetic sequence
cctaccaatgggc

SEQ ID NO: 15016 - DNA, 13 bp, Artificial Sequence
  synthetic sequence
ttttctcattatc

SEQ ID NO: 15017 - DNA, 13 bp, Artificial Sequence
  synthetic sequence
aaaaggaaatcat

SEQ ID NO: 15018 - DNA, 13 bp, Artificial Sequence
  synthetic sequence
gtggcaaagcctg

SEQ ID NO: 15019 - DNA, 13 bp, Artificial Sequence
  synthetic sequence
cagtattgcttgc

SEQ ID NO: 15020 - DNA, 13 bp, Artificial Sequence
  synthetic sequence
ccggggaactgag

SEQ ID NO: 15021 - DNA, 13 bp, Artificial Sequence
  synthetic sequence
tcaactatttggt

SEQ ID NO: 15022 - DNA, 13 bp, Artificial Sequence
  synthetic sequence
ctccctgccatta

SEQ ID NO: 15023 - DNA, 13 bp, Artificial Sequence
  synthetic sequence
atcacaaggggaa

SEQ ID NO: 15024 - DNA, 13 bp, Artificial Sequence
  synthetic sequence
tgactaacacacc

SEQ ID NO: 15025 - DNA, 13 bp, Artificial Sequence
  synthetic sequence
atcgggacacatg

SEQ ID NO: 15026 - DNA, 13 bp, Artificial Sequence
  synthetic sequence
ggcgtgaaaaggt

SEQ ID NO: 15027 - DNA, 13 bp, Artificial Sequence
  synthetic sequence
aagccttacgccg

SEQ ID NO: 15028 - DNA, 13 bp, Artificial Sequence
  synthetic sequence
aaggaagtcaaaa

SEQ ID NO: 15029 - DNA, 13 bp, Artificial Sequence
  synthetic sequence
cattgatctattt

SEQ ID NO: 15030 - DNA, 13 bp, Artificial Sequence
  synthetic sequence
acgatgtatgtca

SEQ ID NO: 15031 - DNA, 13 bp, Artificial Sequence
  synthetic sequence
cccgcgaagaatg

SEQ ID NO: 15032 - DNA, 13 bp, Artificial Sequence
  synthetic sequence
tggcatcgtccac

SEQ ID NO: 15033 - DNA, 13 bp, Artificial Sequence
  synthetic sequence
tttgttgttcgac

SEQ ID NO: 15034 - DNA, 13 bp, Artificial Sequence
  synthetic sequence
atctcgccgcatc

SEQ ID NO: 15035 - DNA, 13 bp, Artificial Sequence
  synthetic sequence
tcaaaggtacgga

SEQ ID NO: 15036 - DNA, 13 bp, Artificial Sequence
  synthetic sequence
cttctctctgccg

SEQ ID NO: 15037 - DNA, 13 bp, Artificial Sequence
  synthetic sequence
ttgcgctgtcgct

SEQ ID NO: 15038 - DNA, 13 bp, Artificial Sequence
  synthetic sequence
catgctcaccagc

SEQ ID NO: 15039 - DNA, 13 bp, Artificial Sequence
  synthetic sequence
agatcgccatgta

SEQ ID NO: 15040 - DNA, 13 bp, Artificial Sequence
  synthetic sequence
ctttggcgaattc

SEQ ID NO: 15041 - DNA, 13 bp, Artificial Sequence
  synthetic sequence
tggatgcgtcctg

SEQ ID NO: 15042 - DNA, 13 bp, Artificial Sequence
  synthetic sequence
tactcgtatcacg

SEQ ID NO: 15043 - DNA, 13 bp, Artificial Sequence
  synthetic sequence
tgttcaaaacgac

SEQ ID NO: 15044 - DNA, 13 bp, Artificial Sequence
  synthetic sequence
tcactaatatacg

SEQ ID NO: 15045 - DNA, 13 bp, Artificial Sequence
  synthetic sequence
acaaacagagact

SEQ ID NO: 15046 - DNA, 13 bp, Artificial Sequence
  synthetic sequence
ccgggaggggata

SEQ ID NO: 15047 - DNA, 13 bp, Artificial Sequence
  synthetic sequence
gctggaactttat

SEQ ID NO: 15048 - DNA, 13 bp, Artificial Sequence
  synthetic sequence
agtgcagttgcct

SEQ ID NO: 15049 - DNA, 13 bp, Artificial Sequence
  synthetic sequence
aacaccgagaaat

SEQ ID NO: 15050 - DNA, 13 bp, Artificial Sequence
  synthetic sequence
gttttgcagcgca

SEQ ID NO: 15051 - DNA, 13 bp, Artificial Sequence
  synthetic sequence
gtagcagcctcaa

SEQ ID NO: 15052 - DNA, 13 bp, Artificial Sequence
  synthetic sequence
acaactcattgat

SEQ ID NO: 15053 - DNA, 13 bp, Artificial Sequence
  synthetic sequence
cctgttttaattt

SEQ ID NO: 15054 - DNA, 13 bp, Artificial Sequence
  synthetic sequence
tgttatttgctga

SEQ ID NO: 15055 - DNA, 13 bp, Artificial Sequence
  synthetic sequence
cctatacgatcat

SEQ ID NO: 15056 - DNA, 13 bp, Artificial Sequence
  synthetic sequence
ataacacctgcga

SEQ ID NO: 15057 - DNA, 13 bp, Artificial Sequence
  synthetic sequence
gaacacgtactga

SEQ ID NO: 15058 - DNA, 13 bp, Artificial Sequence
  synthetic sequence
cagcaccacgagg

SEQ ID NO: 15059 - DNA, 13 bp, Artificial Sequence
  synthetic sequence
tcagcgtttctat

SEQ ID NO: 15060 - DNA, 13 bp, Artificial Sequence
  synthetic sequence
tcttccgattaaa

SEQ ID NO: 15061 - DNA, 13 bp, Artificial Sequence
  synthetic sequence
gatgctctatcta

SEQ ID NO: 15062 - DNA, 13 bp, Artificial Sequence
  synthetic sequence
aagttcagatgga

SEQ ID NO: 15063 - DNA, 13 bp, Artificial Sequence
  synthetic sequence
ccttcattatgcc

SEQ ID NO: 15064 - DNA, 13 bp, Artificial Sequence
  synthetic sequence
tgatgctggcccg

SEQ ID NO: 15065 - DNA, 13 bp, Artificial Sequence
  synthetic sequence
taaagcccttcaa

SEQ ID NO: 15066 - DNA, 13 bp, Artificial Sequence
  synthetic sequence
tcctggccaaggc

SEQ ID NO: 15067 - DNA, 13 bp, Artificial Sequence
  synthetic sequence
atactcgaaaagg

SEQ ID NO: 15068 - DNA, 13 bp, Artificial Sequence
  synthetic sequence
ttccgatattaaa

SEQ ID NO: 15069 - DNA, 13 bp, Artificial Sequence
  synthetic sequence
gatcatcaagcag

SEQ ID NO: 15070 - DNA, 13 bp, Artificial Sequence
  synthetic sequence
gcataccagccaa

SEQ ID NO: 15071 - DNA, 13 bp, Artificial Sequence
  synthetic sequence
gttttgagtatag

SEQ ID NO: 15072 - DNA, 13 bp, Artificial Sequence
  synthetic sequence
gcaatgttgacaa

SEQ ID NO: 15073 - DNA, 13 bp, Artificial Sequence
  synthetic sequence
gatttcaagacaa

SEQ ID NO: 15074 - DNA, 13 bp, Artificial Sequence
  synthetic sequence
cagttgctggccg

SEQ ID NO: 15075 - DNA, 13 bp, Artificial Sequence
  synthetic sequence
tctctccgatttg

SEQ ID NO: 15076 - DNA, 13 bp, Artificial Sequence
  synthetic sequence
aactaccgcttcg

SEQ ID NO: 15077 - DNA, 13 bp, Artificial Sequence
  synthetic sequence
atttaccctggca

SEQ ID NO: 15078 - DNA, 13 bp, Artificial Sequence
  synthetic sequence
gtctgtacggctg

SEQ ID NO: 15079 - DNA, 13 bp, Artificial Sequence
  synthetic sequence
tagaatggtcctc

SEQ ID NO: 15080 - DNA, 13 bp, Artificial Sequence
  synthetic sequence
cgccgatctcaat

SEQ ID NO: 15081 - DNA, 13 bp, Artificial Sequence
  synthetic sequence
acgtgcttcgtat

SEQ ID NO: 15082 - DNA, 13 bp, Artificial Sequence
  synthetic sequence
cggaagagaaact

SEQ ID NO: 15083 - DNA, 13 bp, Artificial Sequence
  synthetic sequence
gctatcctgccgg

SEQ ID NO: 15084 - DNA, 13 bp, Artificial Sequence
  synthetic sequence
attttggcagctt

SEQ ID NO: 15085 - DNA, 13 bp, Artificial Sequence
  synthetic sequence
atgcgtatttatt

SEQ ID NO: 15086 - DNA, 13 bp, Artificial Sequence
  synthetic sequence
tgaaggagttggc

SEQ ID NO: 15087 - DNA, 13 bp, Artificial Sequence
  synthetic sequence
gctggccctttgg

SEQ ID NO: 15088 - DNA, 13 bp, Artificial Sequence
  synthetic sequence
gcaggaagaaatc

SEQ ID NO: 15089 - DNA, 13 bp, Artificial Sequence
  synthetic sequence
attttcgcgtggg

SEQ ID NO: 15090 - DNA, 13 bp, Artificial Sequence
  synthetic sequence
gcggcatgatccg

SEQ ID NO: 15091 - DNA, 13 bp, Artificial Sequence
  synthetic sequence
gggctaaagtgct

SEQ ID NO: 15092 - DNA, 13 bp, Artificial Sequence
  synthetic sequence
tgctgcggtttct

SEQ ID NO: 15093 - DNA, 13 bp, Artificial Sequence
  synthetic sequence
gaggccaatacat

SEQ ID NO: 15094 - DNA, 13 bp, Artificial Sequence
  synthetic sequence
ttcgccgtgagca

SEQ ID NO: 15095 - DNA, 13 bp, Artificial Sequence
  synthetic sequence
tcctcaaccaata

SEQ ID NO: 15096 - DNA, 13 bp, Artificial Sequence
  synthetic sequence
aacgccgtggcag

SEQ ID NO: 15097 - DNA, 13 bp, Artificial Sequence
  synthetic sequence
tagaacctaataa

SEQ ID NO: 15098 - DNA, 13 bp, Artificial Sequence
  synthetic sequence
gagttttatgatt

SEQ ID NO: 15099 - DNA, 13 bp, Artificial Sequence
  synthetic sequence
acccgatcgccca

SEQ ID NO: 15100 - DNA, 13 bp, Artificial Sequence
  synthetic sequence
ggtgtgggaagaa

SEQ ID NO: 15101 - DNA, 13 bp, Artificial Sequence
  synthetic sequence
acatcaccttcct

SEQ ID NO: 15102 - DNA, 13 bp, Artificial Sequence
  synthetic sequence
catgaatgatcca

SEQ ID NO: 15103 - DNA, 13 bp, Artificial Sequence
  synthetic sequence
aggaagctgctac

SEQ ID NO: 15104 - DNA, 13 bp, Artificial Sequence
  synthetic sequence
gtaccaatgcgcc

SEQ ID NO: 15105 - DNA, 13 bp, Artificial Sequence
  synthetic sequence
ttaaatctagtgc

SEQ ID NO: 15106 - DNA, 13 bp, Artificial Sequence
  synthetic sequence
tgcagcgcgaatt

SEQ ID NO: 15107 - DNA, 13 bp, Artificial Sequence
  synthetic sequence
gccaactccagta

SEQ ID NO: 15108 - DNA, 13 bp, Artificial Sequence
  synthetic sequence
gcgattctggcgc

SEQ ID NO: 15109 - DNA, 13 bp, Artificial Sequence
  synthetic sequence
tgcgctcatcgtc

SEQ ID NO: 15110 - DNA, 13 bp, Artificial Sequence
  synthetic sequence
ccgatgttgtgat

SEQ ID NO: 15111 - DNA, 13 bp, Artificial Sequence
  synthetic sequence
gacgatcacgaaa

SEQ ID NO: 15112 - DNA, 13 bp, Artificial Sequence
  synthetic sequence
ggccgaagtcctt

SEQ ID NO: 15113 - DNA, 13 bp, Artificial Sequence
  synthetic sequence
aagatcagcgctg

SEQ ID NO: 15114 - DNA, 13 bp, Artificial Sequence
  synthetic sequence
ttcctggaacgcc

SEQ ID NO: 15115 - DNA, 13 bp, Artificial Sequence
  synthetic sequence
ggatgagattaat

SEQ ID NO: 15116 - DNA, 13 bp, Artificial Sequence
  synthetic sequence
attgtcaaaagaa

SEQ ID NO: 15117 - DNA, 13 bp, Artificial Sequence
  synthetic sequence
aggtgaagtggta

SEQ ID NO: 15118 - DNA, 13 bp, Artificial Sequence
  synthetic sequence
acaatcccattgc

SEQ ID NO: 15119 - DNA, 13 bp, Artificial Sequence
  synthetic sequence
accgatgatgtgt

SEQ ID NO: 15120 - DNA, 13 bp, Artificial Sequence
  synthetic sequence
tatcgtcgccgca

SEQ ID NO: 15121 - DNA, 13 bp, Artificial Sequence
  synthetic sequence
gcaaacgcaggat

SEQ ID NO: 15122 - DNA, 13 bp, Artificial Sequence
  synthetic sequence
actcagaagcaga

SEQ ID NO: 15123 - DNA, 13 bp, Artificial Sequence
  synthetic sequence
cggcacattatta

SEQ ID NO: 15124 - DNA, 13 bp, Artificial Sequence
  synthetic sequence
gaaaggtggcttc

SEQ ID NO: 15125 - DNA, 13 bp, Artificial Sequence
  synthetic sequence
ggttccgtggtca

SEQ ID NO: 15126 - DNA, 13 bp, Artificial Sequence
  synthetic sequence
ttaatcgcctgga

SEQ ID NO: 15127 - DNA, 13 bp, Artificial Sequence
  synthetic sequence
gcattctggccca

SEQ ID NO: 15128 - DNA, 13 bp, Artificial Sequence
  synthetic sequence
ggtaaatcaccaa

SEQ ID NO: 15129 - DNA, 13 bp, Artificial Sequence
  synthetic sequence
attttgctaatct

SEQ ID NO: 15130 - DNA, 13 bp, Artificial Sequence
  synthetic sequence
gtcgtgcaatacg

SEQ ID NO: 15131 - DNA, 13 bp, Artificial Sequence
  synthetic sequence
ggaatcagtacgc

SEQ ID NO: 15132 - DNA, 13 bp, Artificial Sequence
  synthetic sequence
caggcgcccaata

SEQ ID NO: 15133 - DNA, 13 bp, Artificial Sequence
  synthetic sequence
gttttaattcttc

SEQ ID NO: 15134 - DNA, 13 bp, Artificial Sequence
  synthetic sequence
aatatgcagtagt

SEQ ID NO: 15135 - DNA, 13 bp, Artificial Sequence
  synthetic sequence
catgcccgaagtg

SEQ ID NO: 15136 - DNA, 13 bp, Artificial Sequence
  synthetic sequence
agcaactgcagcg

SEQ ID NO: 15137 - DNA, 13 bp, Artificial Sequence
  synthetic sequence
atccagcctggtt

SEQ ID NO: 15138 - DNA, 13 bp, Artificial Sequence
  synthetic sequence
tttgcgggcgtac

SEQ ID NO: 15139 - DNA, 13 bp, Artificial Sequence
  synthetic sequence
aaatttgatgctc

SEQ ID NO: 15140 - DNA, 13 bp, Artificial Sequence
  synthetic sequence
cagaagcgcgtaa

SEQ ID NO: 15141 - DNA, 13 bp, Artificial Sequence
  synthetic sequence
ctcggggtgatcg

SEQ ID NO: 15142 - DNA, 13 bp, Artificial Sequence
  synthetic sequence
gtgatcaccccgg

SEQ ID NO: 15143 - DNA, 13 bp, Artificial Sequence
  synthetic sequence
gacgatgtgctca

SEQ ID NO: 15144 - DNA, 13 bp, Artificial Sequence
  synthetic sequence
ccccagaaagact

SEQ ID NO: 15145 - DNA, 13 bp, Artificial Sequence
  synthetic sequence
taattagcccgat

SEQ ID NO: 15146 - DNA, 13 bp, Artificial Sequence
  synthetic sequence
ctgaaacgtaaag

SEQ ID NO: 15147 - DNA, 13 bp, Artificial Sequence
  synthetic sequence
actggcagggatc

SEQ ID NO: 15148 - DNA, 13 bp, Artificial Sequence
  synthetic sequence
acaagtaatcgag

SEQ ID NO: 15149 - DNA, 13 bp, Artificial Sequence
  synthetic sequence
gccttgtcacggt

SEQ ID NO: 15150 - DNA, 13 bp, Artificial Sequence
  synthetic sequence
tagaatagattgt

SEQ ID NO: 15151 - DNA, 13 bp, Artificial Sequence
  synthetic sequence
gacagtgcagcag

SEQ ID NO: 15152 - DNA, 13 bp, Artificial Sequence
  synthetic sequence
tcaagcaccttaa

SEQ ID NO: 15153 - DNA, 13 bp, Artificial Sequence
  synthetic sequence
tgatcaaccgggt

SEQ ID NO: 15154 - DNA, 13 bp, Artificial Sequence
  synthetic sequence
agcagatttgctc

SEQ ID NO: 15155 - DNA, 13 bp, Artificial Sequence
  synthetic sequence
aaaatgcgatcga

SEQ ID NO: 15156 - DNA, 13 bp, Artificial Sequence
  synthetic sequence
cgcgatctgctga

SEQ ID NO: 15157 - DNA, 13 bp, Artificial Sequence
  synthetic sequence
ctgcggattgttc

SEQ ID NO: 15158 - DNA, 13 bp, Artificial Sequence
  synthetic sequence
cttcgccttatga

SEQ ID NO: 15159 - DNA, 13 bp, Artificial Sequence
  synthetic sequence
cggggagaaaggt

SEQ ID NO: 15160 - DNA, 13 bp, Artificial Sequence
  synthetic sequence
ggactggtgcgtc

SEQ ID NO: 15161 - DNA, 13 bp, Artificial Sequence
  synthetic sequence
gccttctgaatgt

SEQ ID NO: 15162 - DNA, 13 bp, Artificial Sequence
  synthetic sequence
attacgtggatac

SEQ ID NO: 15163 - DNA, 13 bp, Artificial Sequence
  synthetic sequence
gttgctccattaa

SEQ ID NO: 15164 - DNA, 13 bp, Artificial Sequence
  synthetic sequence
cgctgcaaaatga

SEQ ID NO: 15165 - DNA, 13 bp, Artificial Sequence
  synthetic sequence
ctggtatgttcag

SEQ ID NO: 15166 - DNA, 13 bp, Artificial Sequence
  synthetic sequence
gagcaacgtacga

SEQ ID NO: 15167 - DNA, 13 bp, Artificial Sequence
  synthetic sequence
ctgcacaaaactt

SEQ ID NO: 15168 - DNA, 13 bp, Artificial Sequence
  synthetic sequence
gcatacacacgcg

SEQ ID NO: 15169 - DNA, 13 bp, Artificial Sequence
  synthetic sequence
cgttggccgcatc

SEQ ID NO: 15170 - DNA, 13 bp, Artificial Sequence
  synthetic sequence
ttacgccgatccc

SEQ ID NO: 15171 - DNA, 13 bp, Artificial Sequence
  synthetic sequence
atatagtgataac

SEQ ID NO: 15172 - DNA, 13 bp, Artificial Sequence
  synthetic sequence
atcctgtatctaa

SEQ ID NO: 15173 - DNA, 13 bp, Artificial Sequence
  synthetic sequence
cagatttggtaac

SEQ ID NO: 15174 - DNA, 13 bp, Artificial Sequence
  synthetic sequence
ccattactagtcg

SEQ ID NO: 15175 - DNA, 13 bp, Artificial Sequence
  synthetic sequence
cacgcgcagcgtt

SEQ ID NO: 15176 - DNA, 13 bp, Artificial Sequence
  synthetic sequence
gttgcatcgacac

SEQ ID NO: 15177 - DNA, 13 bp, Artificial Sequence
  synthetic sequence
tcagggtgatcac

SEQ ID NO: 15178 - DNA, 13 bp, Artificial Sequence
  synthetic sequence
ttcaaggcggcgc

SEQ ID NO: 15179 - DNA, 13 bp, Artificial Sequence
  synthetic sequence
cggcgatcaacac

SEQ ID NO: 15180 - DNA, 13 bp, Artificial Sequence
  synthetic sequence
agcagcagcgtcc

SEQ ID NO: 15181 - DNA, 13 bp, Artificial Sequence
  synthetic sequence
ccgatggtggtca

SEQ ID NO: 15182 - DNA, 13 bp, Artificial Sequence
  synthetic sequence
taatgacattgat

SEQ ID NO: 15183 - DNA, 13 bp, Artificial Sequence
  synthetic sequence
aaacgttgatcct

SEQ ID NO: 15184 - DNA, 13 bp, Artificial Sequence
  synthetic sequence
gtaatatgccaga

SEQ ID NO: 15185 - DNA, 13 bp, Artificial Sequence
  synthetic sequence
tccaatgagctca

SEQ ID NO: 15186 - DNA, 13 bp, Artificial Sequence
  synthetic sequence
cgatggccacgtc

SEQ ID NO: 15187 - DNA, 13 bp, Artificial Sequence
  synthetic sequence
acggaaccatctc

SEQ ID NO: 15188 - DNA, 13 bp, Artificial Sequence
  synthetic sequence
ttaatgtttgaag

SEQ ID NO: 15189 - DNA, 13 bp, Artificial Sequence
  synthetic sequence
gattggccctatt

SEQ ID NO: 15190 - DNA, 13 bp, Artificial Sequence
  synthetic sequence
gtatcggttacct

SEQ ID NO: 15191 - DNA, 13 bp, Artificial Sequence
  synthetic sequence
tgtaaatagcaat

SEQ ID NO: 15192 - DNA, 13 bp, Artificial Sequence
  synthetic sequence
gaccagggcgatc

SEQ ID NO: 15193 - DNA, 13 bp, Artificial Sequence
  synthetic sequence
tgaggctcgcacg

SEQ ID NO: 15194 - DNA, 13 bp, Artificial Sequence
  synthetic sequence
tagtggatcttcc

SEQ ID NO: 15195 - DNA, 13 bp, Artificial Sequence
  synthetic sequence
ctagggctttgga

SEQ ID NO: 15196 - DNA, 13 bp, Artificial Sequence
  synthetic sequence
aagaaatccatgg

SEQ ID NO: 15197 - DNA, 13 bp, Artificial Sequence
  synthetic sequence
aattgtatgctgg

SEQ ID NO: 15198 - DNA, 13 bp, Artificial Sequence
  synthetic sequence
acgcgcagtcgat

SEQ ID NO: 15199 - DNA, 13 bp, Artificial Sequence
  synthetic sequence
tcgccctggctga

SEQ ID NO: 15200 - DNA, 13 bp, Artificial Sequence
  synthetic sequence
atacatcgccggt

SEQ ID NO: 15201 - DNA, 13 bp, Artificial Sequence
  synthetic sequence
ggaaatcacgctc

SEQ ID NO: 15202 - DNA, 13 bp, Artificial Sequence
  synthetic sequence
tcactcaagtaat

SEQ ID NO: 15203 - DNA, 13 bp, Artificial Sequence
  synthetic sequence
accccatgccaat

SEQ ID NO: 15204 - DNA, 13 bp, Artificial Sequence
  synthetic sequence
aattcggcggtgg

SEQ ID NO: 15205 - DNA, 13 bp, Artificial Sequence
  synthetic sequence
gcgacggctttct

SEQ ID NO: 15206 - DNA, 13 bp, Artificial Sequence
  synthetic sequence
cattctgaatctc

SEQ ID NO: 15207 - DNA, 13 bp, Artificial Sequence
  synthetic sequence
tggtattcatcgg

SEQ ID NO: 15208 - DNA, 13 bp, Artificial Sequence
  synthetic sequence
agcattccaggta

SEQ ID NO: 15209 - DNA, 13 bp, Artificial Sequence
  synthetic sequence
ctcagctgcgtca

SEQ ID NO: 15210 - DNA, 13 bp, Artificial Sequence
  synthetic sequence
tgctcgtggtacc

SEQ ID NO: 15211 - DNA, 13 bp, Artificial Sequence
  synthetic sequence
cgaccactgccaa

SEQ ID NO: 15212 - DNA, 13 bp, Artificial Sequence
  synthetic sequence
gtttgagaatgaa

SEQ ID NO: 15213 - DNA, 13 bp, Artificial Sequence
  synthetic sequence
cttcaggccctcg

SEQ ID NO: 15214 - DNA, 13 bp, Artificial Sequence
  synthetic sequence
aggtactaccgaa

SEQ ID NO: 15215 - DNA, 13 bp, Artificial Sequence
  synthetic sequence
tggctggcacgct

SEQ ID NO: 15216 - DNA, 13 bp, Artificial Sequence
  synthetic sequence
gattcccctgcct

SEQ ID NO: 15217 - DNA, 13 bp, Artificial Sequence
  synthetic sequence
gcctggtcaccga

SEQ ID NO: 15218 - DNA, 13 bp, Artificial Sequence
  synthetic sequence
gcgaactgcaatt

SEQ ID NO: 15219 - DNA, 13 bp, Artificial Sequence
  synthetic sequence
gtcgacgttcaaa

SEQ ID NO: 15220 - DNA, 13 bp, Artificial Sequence
  synthetic sequence
acgtggtggcatt

SEQ ID NO: 15221 - DNA, 13 bp, Artificial Sequence
  synthetic sequence
ggcgaagtcttga

SEQ ID NO: 15222 - DNA, 13 bp, Artificial Sequence
  synthetic sequence
caagagccgaact

SEQ ID NO: 15223 - DNA, 13 bp, Artificial Sequence
  synthetic sequence
tattccattttga

SEQ ID NO: 15224 - DNA, 13 bp, Artificial Sequence
  synthetic sequence
agcagtgggttcg

SEQ ID NO: 15225 - DNA, 13 bp, Artificial Sequence
  synthetic sequence
cggtacttattgc

SEQ ID NO: 15226 - DNA, 13 bp, Artificial Sequence
  synthetic sequence
aataactttcctt

SEQ ID NO: 15227 - DNA, 13 bp, Artificial Sequence
  synthetic sequence
gcgtactgttcca

SEQ ID NO: 15228 - DNA, 13 bp, Artificial Sequence
  synthetic sequence
aagagggaccggt

SEQ ID NO: 15229 - DNA, 13 bp, Artificial Sequence
  synthetic sequence
tgacctcggcctc

SEQ ID NO: 15230 - DNA, 13 bp, Artificial Sequence
  synthetic sequence
ttaagagatgctt

SEQ ID NO: 15231 - DNA, 13 bp, Artificial Sequence
  synthetic sequence
ctgctgaccatgc

SEQ ID NO: 15232 - DNA, 13 bp, Artificial Sequence
  synthetic sequence
tacagaaccgcgt

SEQ ID NO: 15233 - DNA, 13 bp, Artificial Sequence
  synthetic sequence
ggggcaatacaag

SEQ ID NO: 15234 - DNA, 13 bp, Artificial Sequence
  synthetic sequence
cccgatggagctc

SEQ ID NO: 15235 - DNA, 13 bp, Artificial Sequence
  synthetic sequence
gttcaggctggcg

SEQ ID NO: 15236 - DNA, 13 bp, Artificial Sequence
  synthetic sequence
aaacagatccccg

SEQ ID NO: 15237 - DNA, 13 bp, Artificial Sequence
  synthetic sequence
actttaaataccg

SEQ ID NO: 15238 - DNA, 13 bp, Artificial Sequence
  synthetic sequence
tgaacattatcaa

SEQ ID NO: 15239 - DNA, 13 bp, Artificial Sequence
  synthetic sequence
tactgcgcagaat

SEQ ID NO: 15240 - DNA, 13 bp, Artificial Sequence
  synthetic sequence
ataagctctagcc

SEQ ID NO: 15241 - DNA, 13 bp, Artificial Sequence
  synthetic sequence
taaagctggctta

SEQ ID NO: 15242 - DNA, 13 bp, Artificial Sequence
  synthetic sequence
aaacgctatacaa

SEQ ID NO: 15243 - DNA, 13 bp, Artificial Sequence
  synthetic sequence
atgtccgggttgg

SEQ ID NO: 15244 - DNA, 13 bp, Artificial Sequence
  synthetic sequence
ctcgaaaactaaa

SEQ ID NO: 15245 - DNA, 13 bp, Artificial Sequence
  synthetic sequence
ggatgcaacctcc

SEQ ID NO: 15246 - DNA, 13 bp, Artificial Sequence
  synthetic sequence
agaaaacgcttca

SEQ ID NO: 15247 - DNA, 13 bp, Artificial Sequence
  synthetic sequence
aagctgtgagctg

SEQ ID NO: 15248 - DNA, 13 bp, Artificial Sequence
  synthetic sequence
cgtcgagagcttc

SEQ ID NO: 15249 - DNA, 13 bp, Artificial Sequence
  synthetic sequence
tggcctcgtatgt

SEQ ID NO: 15250 - DNA, 13 bp, Artificial Sequence
  synthetic sequence
gagtatgacgaga

SEQ ID NO: 15251 - DNA, 13 bp, Artificial Sequence
  synthetic sequence
tagctctcgttcg

SEQ ID NO: 15252 - DNA, 13 bp, Artificial Sequence
  synthetic sequence
cgcattactggcc

SEQ ID NO: 15253 - DNA, 13 bp, Artificial Sequence
  synthetic sequence
ccaatgcaccctg

SEQ ID NO: 15254 - DNA, 13 bp, Artificial Sequence
  synthetic sequence
tctattatgtgta

SEQ ID NO: 15255 - DNA, 13 bp, Artificial Sequence
  synthetic sequence
cacctccatggtt

SEQ ID NO: 15256 - DNA, 13 bp, Artificial Sequence
  synthetic sequence
accaatcggcagg

SEQ ID NO: 15257 - DNA, 13 bp, Artificial Sequence
  synthetic sequence
cgcaaggctggag

SEQ ID NO: 15258 - DNA, 13 bp, Artificial Sequence
  synthetic sequence
agcaacaaattcg

SEQ ID NO: 15259 - DNA, 13 bp, Artificial Sequence
  synthetic sequence
actgaactcatca

SEQ ID NO: 15260 - DNA, 13 bp, Artificial Sequence
  synthetic sequence
tggttgaaaatct

SEQ ID NO: 15261 - DNA, 13 bp, Artificial Sequence
  synthetic sequence
ccgctacaacttt

SEQ ID NO: 15262 - DNA, 13 bp, Artificial Sequence
  synthetic sequence
gttagggatgctt

SEQ ID NO: 15263 - DNA, 13 bp, Artificial Sequence
  synthetic sequence
agttctatatggt

SEQ ID NO: 15264 - DNA, 13 bp, Artificial Sequence
  synthetic sequence
aggcagtaaggcc

SEQ ID NO: 15265 - DNA, 13 bp, Artificial Sequence
  synthetic sequence
tccacatggccat

SEQ ID NO: 15266 - DNA, 13 bp, Artificial Sequence
  synthetic sequence
tctactgtcaatc

SEQ ID NO: 15267 - DNA, 13 bp, Artificial Sequence
  synthetic sequence
agcgcgccgaaca

SEQ ID NO: 15268 - DNA, 13 bp, Artificial Sequence
  synthetic sequence
gctggcggaaaag

SEQ ID NO: 15269 - DNA, 13 bp, Artificial Sequence
  synthetic sequence
gggaagtggtcgc

SEQ ID NO: 15270 - DNA, 13 bp, Artificial Sequence
  synthetic sequence
caagcagacccag

SEQ ID NO: 15271 - DNA, 13 bp, Artificial Sequence
  synthetic sequence
tcggtatctgtat

SEQ ID NO: 15272 - DNA, 13 bp, Artificial Sequence
  synthetic sequence
ctgatcagcagac

SEQ ID NO: 15273 - DNA, 13 bp, Artificial Sequence
  synthetic sequence
caaggtgtgtctc

SEQ ID NO: 15274 - DNA, 13 bp, Artificial Sequence
  synthetic sequence
aagggaaatggga

SEQ ID NO: 15275 - DNA, 13 bp, Artificial Sequence
  synthetic sequence
acagtttccttga

SEQ ID NO: 15276 - DNA, 13 bp, Artificial Sequence
  synthetic sequence
gcctgttccgtgg

SEQ ID NO: 15277 - DNA, 13 bp, Artificial Sequence
  synthetic sequence
ataccggctatgc

SEQ ID NO: 15278 - DNA, 13 bp, Artificial Sequence
  synthetic sequence
gcgaaggcatgac

SEQ ID NO: 15279 - DNA, 13 bp, Artificial Sequence
  synthetic sequence
tggctgccaagtc

SEQ ID NO: 15280 - DNA, 13 bp, Artificial Sequence
  synthetic sequence
ttaactcatgaga

SEQ ID NO: 15281 - DNA, 13 bp, Artificial Sequence
  synthetic sequence
cgtatctcgtgga

SEQ ID NO: 15282 - DNA, 13 bp, Artificial Sequence
  synthetic sequence
gaaacaccatcca

SEQ ID NO: 15283 - DNA, 13 bp, Artificial Sequence
  synthetic sequence
gaaaggaatgatg

SEQ ID NO: 15284 - DNA, 13 bp, Artificial Sequence
  synthetic sequence
cgaggtctcgtag

SEQ ID NO: 15285 - DNA, 13 bp, Artificial Sequence
  synthetic sequence
aaggtccactgtc

SEQ ID NO: 15286 - DNA, 13 bp, Artificial Sequence
  synthetic sequence
tcctcataacaaa

SEQ ID NO: 15287 - DNA, 13 bp, Artificial Sequence
  synthetic sequence
tcatcggcaggct

SEQ ID NO: 15288 - DNA, 13 bp, Artificial Sequence
  synthetic sequence
ttaagagaaatga

SEQ ID NO: 15289 - DNA, 13 bp, Artificial Sequence
  synthetic sequence
atctttcagcgcg

SEQ ID NO: 15290 - DNA, 13 bp, Artificial Sequence
  synthetic sequence
ctcgcagtaaatt

SEQ ID NO: 15291 - DNA, 13 bp, Artificial Sequence
  synthetic sequence
acaggtcagcggc

SEQ ID NO: 15292 - DNA, 13 bp, Artificial Sequence
  synthetic sequence
acgttgaagtacc

SEQ ID NO: 15293 - DNA, 13 bp, Artificial Sequence
  synthetic sequence
ccagccctctgag

SEQ ID NO: 15294 - DNA, 13 bp, Artificial Sequence
  synthetic sequence
ttggtgctgcaat

SEQ ID NO: 15295 - DNA, 13 bp, Artificial Sequence
  synthetic sequence
gacgtcatcaatg

SEQ ID NO: 15296 - DNA, 13 bp, Artificial Sequence
  synthetic sequence
gcaacgttctgat

SEQ ID NO: 15297 - DNA, 13 bp, Artificial Sequence
  synthetic sequence
atcttggtgctgg

SEQ ID NO: 15298 - DNA, 13 bp, Artificial Sequence
  synthetic sequence
gaaacagcaaaat

SEQ ID NO: 15299 - DNA, 13 bp, Artificial Sequence
  synthetic sequence
agttcgtgatcga

SEQ ID NO: 15300 - DNA, 13 bp, Artificial Sequence
  synthetic sequence
agtgaatttatgg

SEQ ID NO: 15301 - DNA, 13 bp, Artificial Sequence
  synthetic sequence
aacaggggattga

SEQ ID NO: 15302 - DNA, 13 bp, Artificial Sequence
  synthetic sequence
tttctacaccttg

SEQ ID NO: 15303 - DNA, 13 bp, Artificial Sequence
  synthetic sequence
atgtttcaaattc

SEQ ID NO: 15304 - DNA, 13 bp, Artificial Sequence
  synthetic sequence
ctaaaactgatgt

SEQ ID NO: 15305 - DNA, 13 bp, Artificial Sequence
  synthetic sequence
tctcaaccgttgc

SEQ ID NO: 15306 - DNA, 13 bp, Artificial Sequence
  synthetic sequence
atgctgccgcgta

SEQ ID NO: 15307 - DNA, 13 bp, Artificial Sequence
  synthetic sequence
catcgaggccgac

SEQ ID NO: 15308 - DNA, 13 bp, Artificial Sequence
  synthetic sequence
tagcccaggcgca

SEQ ID NO: 15309 - DNA, 13 bp, Artificial Sequence
  synthetic sequence
gacagatagttgg

SEQ ID NO: 15310 - DNA, 13 bp, Artificial Sequence
  synthetic sequence
aagctttcattat

SEQ ID NO: 15311 - DNA, 13 bp, Artificial Sequence
  synthetic sequence
ctggctgatgtgg

SEQ ID NO: 15312 - DNA, 13 bp, Artificial Sequence
  synthetic sequence
caccccagcactt

SEQ ID NO: 15313 - DNA, 13 bp, Artificial Sequence
  synthetic sequence
aggaacgcgtctg

SEQ ID NO: 15314 - DNA, 13 bp, Artificial Sequence
  synthetic sequence
ctttaagatgtgc

SEQ ID NO: 15315 - DNA, 13 bp, Artificial Sequence
  synthetic sequence
atatattagaacg

SEQ ID NO: 15316 - DNA, 13 bp, Artificial Sequence
  synthetic sequence
gaacgacagcacc

SEQ ID NO: 15317 - DNA, 13 bp, Artificial Sequence
  synthetic sequence
ctgctgaaccgcg

SEQ ID NO: 15318 - DNA, 13 bp, Artificial Sequence
  synthetic sequence
ggagagagcgaga

SEQ ID NO: 15319 - DNA, 13 bp, Artificial Sequence
  synthetic sequence
ggtaattcctaca

SEQ ID NO: 15320 - DNA, 13 bp, Artificial Sequence
  synthetic sequence
caatcatctaccc

SEQ ID NO: 15321 - DNA, 13 bp, Artificial Sequence
  synthetic sequence
cgttacagggcat

SEQ ID NO: 15322 - DNA, 13 bp, Artificial Sequence
  synthetic sequence
actgggcctcgaa

SEQ ID NO: 15323 - DNA, 13 bp, Artificial Sequence
  synthetic sequence
acgtcttattcac

SEQ ID NO: 15324 - DNA, 13 bp, Artificial Sequence
  synthetic sequence
ctttaaatccgac

SEQ ID NO: 15325 - DNA, 13 bp, Artificial Sequence
  synthetic sequence
ttctgttgtttgg

SEQ ID NO: 15326 - DNA, 13 bp, Artificial Sequence
  synthetic sequence
gttcggcccttcg

SEQ ID NO: 15327 - DNA, 13 bp, Artificial Sequence
  synthetic sequence
acaaggtttagca

SEQ ID NO: 15328 - DNA, 13 bp, Artificial Sequence
  synthetic sequence
gccggatagcgtt

SEQ ID NO: 15329 - DNA, 13 bp, Artificial Sequence
  synthetic sequence
agattatacagat

SEQ ID NO: 15330 - DNA, 13 bp, Artificial Sequence
  synthetic sequence
cgtcgcacacaag

SEQ ID NO: 15331 - DNA, 13 bp, Artificial Sequence
  synthetic sequence
attggtcatgatg

SEQ ID NO: 15332 - DNA, 13 bp, Artificial Sequence
  synthetic sequence
gtaagctgacgta

SEQ ID NO: 15333 - DNA, 13 bp, Artificial Sequence
  synthetic sequence
cggtcagtggctt

SEQ ID NO: 15334 - DNA, 13 bp, Artificial Sequence
  synthetic sequence
tgggctttgtgaa

SEQ ID NO: 15335 - DNA, 13 bp, Artificial Sequence
  synthetic sequence
ggcttcttcggtt

SEQ ID NO: 15336 - DNA, 13 bp, Artificial Sequence
  synthetic sequence
ccgtgctgagcga

SEQ ID NO: 15337 - DNA, 13 bp, Artificial Sequence
  synthetic sequence
ctcgcatctcccc

SEQ ID NO: 15338 - DNA, 13 bp, Artificial Sequence
  synthetic sequence
gcaaacagagtca

SEQ ID NO: 15339 - DNA, 13 bp, Artificial Sequence
  synthetic sequence
tacgtgaggcgac

SEQ ID NO: 15340 - DNA, 13 bp, Artificial Sequence
  synthetic sequence
agacggcgtacag

SEQ ID NO: 15341 - DNA, 13 bp, Artificial Sequence
  synthetic sequence
acttcgggccgta

SEQ ID NO: 15342 - DNA, 13 bp, Artificial Sequence
  synthetic sequence
atcagtcaaactg

SEQ ID NO: 15343 - DNA, 13 bp, Artificial Sequence
  synthetic sequence
ccgattgatcatc

SEQ ID NO: 15344 - DNA, 13 bp, Artificial Sequence
  synthetic sequence
tcgtaaacgatgc

SEQ ID NO: 15345 - DNA, 13 bp, Artificial Sequence
  synthetic sequence
cttttggatcagc

SEQ ID NO: 15346 - DNA, 13 bp, Artificial Sequence
  synthetic sequence
tgtttcattcttt

SEQ ID NO: 15347 - DNA, 13 bp, Artificial Sequence
  synthetic sequence
acttctttctgag

SEQ ID NO: 15348 - DNA, 13 bp, Artificial Sequence
  synthetic sequence
gtaccaccaggct

SEQ ID NO: 15349 - DNA, 13 bp, Artificial Sequence
  synthetic sequence
cacgcccaagtac

SEQ ID NO: 15350 - DNA, 13 bp, Artificial Sequence
  synthetic sequence
gtttgtgcctagt

SEQ ID NO: 15351 - DNA, 13 bp, Artificial Sequence
  synthetic sequence
tggcgtattgcct

SEQ ID NO: 15352 - DNA, 13 bp, Artificial Sequence
  synthetic sequence
gcctacgagccca

SEQ ID NO: 15353 - DNA, 13 bp, Artificial Sequence
  synthetic sequence
tcaggagtagcac

SEQ ID NO: 15354 - DNA, 13 bp, Artificial Sequence
  synthetic sequence
aggttagtacaag

SEQ ID NO: 15355 - DNA, 13 bp, Artificial Sequence
  synthetic sequence
tactgtttgcaga

SEQ ID NO: 15356 - DNA, 13 bp, Artificial Sequence
  synthetic sequence
cgtcaaaagacaa

SEQ ID NO: 15357 - DNA, 13 bp, Artificial Sequence
  synthetic sequence
caacaaggcgcgg

SEQ ID NO: 15358 - DNA, 13 bp, Artificial Sequence
  synthetic sequence
gctgacgcccgta

SEQ ID NO: 15359 - DNA, 13 bp, Artificial Sequence
  synthetic sequence
tgggaagcagtga

SEQ ID NO: 15360 - DNA, 13 bp, Artificial Sequence
  synthetic sequence
ttgaggcacagac

SEQ ID NO: 15361 - DNA, 13 bp, Artificial Sequence
  synthetic sequence
tgctttgctggca

SEQ ID NO: 15362 - DNA, 13 bp, Artificial Sequence
  synthetic sequence
gctgttgtgcagc

SEQ ID NO: 15363 - DNA, 13 bp, Artificial Sequence
  synthetic sequence
agcgaacgttgag

SEQ ID NO: 15364 - DNA, 13 bp, Artificial Sequence
  synthetic sequence
atgtataagaact

SEQ ID NO: 15365 - DNA, 13 bp, Artificial Sequence
  synthetic sequence
ttactctaacatt

SEQ ID NO: 15366 - DNA, 13 bp, Artificial Sequence
  synthetic sequence
ctcctcggtgcat

SEQ ID NO: 15367 - DNA, 13 bp, Artificial Sequence
  synthetic sequence
ttcgcgctccgga

SEQ ID NO: 15368 - DNA, 13 bp, Artificial Sequence
  synthetic sequence
atacgagaagatg

SEQ ID NO: 15369 - DNA, 13 bp, Artificial Sequence
  synthetic sequence
acaaatgacaacg

SEQ ID NO: 15370 - DNA, 13 bp, Artificial Sequence
  synthetic sequence
ttttctttccaaa

SEQ ID NO: 15371 - DNA, 13 bp, Artificial Sequence
  synthetic sequence
acgattttagccg

SEQ ID NO: 15372 - DNA, 13 bp, Artificial Sequence
  synthetic sequence
aagctgcgcctct

SEQ ID NO: 15373 - DNA, 13 bp, Artificial Sequence
  synthetic sequence
ataaggatgccaa

SEQ ID NO: 15374 - DNA, 13 bp, Artificial Sequence
  synthetic sequence
cgcatggcagaag

SEQ ID NO: 15375 - DNA, 13 bp, Artificial Sequence
  synthetic sequence
gacaatcaacagc

SEQ ID NO: 15376 - DNA, 13 bp, Artificial Sequence
  synthetic sequence
acgttcaggtgcc

SEQ ID NO: 15377 - DNA, 13 bp, Artificial Sequence
  synthetic sequence
ccgattgctcggc

SEQ ID NO: 15378 - DNA, 13 bp, Artificial Sequence
  synthetic sequence
cctgctagcagcc

SEQ ID NO: 15379 - DNA, 13 bp, Artificial Sequence
  synthetic sequence
ggaacaggccgag

SEQ ID NO: 15380 - DNA, 13 bp, Artificial Sequence
  synthetic sequence
atctcaatgatat

SEQ ID NO: 15381 - DNA, 13 bp, Artificial Sequence
  synthetic sequence
ctattaacaaaga

SEQ ID NO: 15382 - DNA, 13 bp, Artificial Sequence
  synthetic sequence
agtcacgaccgcc

SEQ ID NO: 15383 - DNA, 13 bp, Artificial Sequence
  synthetic sequence
ccaacggcacgct

SEQ ID NO: 15384 - DNA, 13 bp, Artificial Sequence
  synthetic sequence
tcgactggtgcct

SEQ ID NO: 15385 - DNA, 13 bp, Artificial Sequence
  synthetic sequence
acggtgagtggct

SEQ ID NO: 15386 - DNA, 13 bp, Artificial Sequence
  synthetic sequence
caaatgccatccc

SEQ ID NO: 15387 - DNA, 13 bp, Artificial Sequence
  synthetic sequence
gagcgttattatc

SEQ ID NO: 15388 - DNA, 13 bp, Artificial Sequence
  synthetic sequence
gccataatccttt

SEQ ID NO: 15389 - DNA, 13 bp, Artificial Sequence
  synthetic sequence
gaagtatatcagt

SEQ ID NO: 15390 - DNA, 13 bp, Artificial Sequence
  synthetic sequence
ttccgccagttcc

SEQ ID NO: 15391 - DNA, 13 bp, Artificial Sequence
  synthetic sequence
aacataccgggca

SEQ ID NO: 15392 - DNA, 13 bp, Artificial Sequence
  synthetic sequence
atgcggcaagtca

SEQ ID NO: 15393 - DNA, 13 bp, Artificial Sequence
  synthetic sequence
ccatgccaatcgg

SEQ ID NO: 15394 - DNA, 13 bp, Artificial Sequence
  synthetic sequence
gagaaaagagata

SEQ ID NO: 15395 - DNA, 13 bp, Artificial Sequence
  synthetic sequence
cgtcaacgacacg

SEQ ID NO: 15396 - DNA, 13 bp, Artificial Sequence
  synthetic sequence
ttgatgcaggaaa

SEQ ID NO: 15397 - DNA, 13 bp, Artificial Sequence
  synthetic sequence
agaacgccatctt

SEQ ID NO: 15398 - DNA, 13 bp, Artificial Sequence
  synthetic sequence
agtccaaactaaa

SEQ ID NO: 15399 - DNA, 13 bp, Artificial Sequence
  synthetic sequence
tgctaaagcacgg

SEQ ID NO: 15400 - DNA, 13 bp, Artificial Sequence
  synthetic sequence
actgcaacagaac

SEQ ID NO: 15401 - DNA, 13 bp, Artificial Sequence
  synthetic sequence
ctcatagacaagt

SEQ ID NO: 15402 - DNA, 13 bp, Artificial Sequence
  synthetic sequence
gtggtccgcctct

SEQ ID NO: 15403 - DNA, 13 bp, Artificial Sequence
  synthetic sequence
aaggttttacaga

SEQ ID NO: 15404 - DNA, 13 bp, Artificial Sequence
  synthetic sequence
cagcatccagcgg

SEQ ID NO: 15405 - DNA, 13 bp, Artificial Sequence
  synthetic sequence
gctccagttcgtc

SEQ ID NO: 15406 - DNA, 13 bp, Artificial Sequence
  synthetic sequence
tcttcaatgccat

SEQ ID NO: 15407 - DNA, 13 bp, Artificial Sequence
  synthetic sequence
gccaaatatcata

SEQ ID NO: 15408 - DNA, 13 bp, Artificial Sequence
  synthetic sequence
acttgaagagatc

SEQ ID NO: 15409 - DNA, 13 bp, Artificial Sequence
  synthetic sequence
aacgctgcttgag

SEQ ID NO: 15410 - DNA, 13 bp, Artificial Sequence
  synthetic sequence
cgccgccaaatcc

SEQ ID NO: 15411 - DNA, 13 bp, Artificial Sequence
  synthetic sequence
cgactcgccgatg

SEQ ID NO: 15412 - DNA, 13 bp, Artificial Sequence
  synthetic sequence
aacaaaccaatac

SEQ ID NO: 15413 - DNA, 13 bp, Artificial Sequence
  synthetic sequence
tgaatggtgaaat

SEQ ID NO: 15414 - DNA, 13 bp, Artificial Sequence
  synthetic sequence
atccacgccgaag

SEQ ID NO: 15415 - DNA, 13 bp, Artificial Sequence
  synthetic sequence
gtcgctgaccgca

SEQ ID NO: 15416 - DNA, 13 bp, Artificial Sequence
  synthetic sequence
ttgcctaccacga

SEQ ID NO: 15417 - DNA, 13 bp, Artificial Sequence
  synthetic sequence
acaatcgccaggc

SEQ ID NO: 15418 - DNA, 13 bp, Artificial Sequence
  synthetic sequence
gcggcgttcgcta

SEQ ID NO: 15419 - DNA, 13 bp, Artificial Sequence
  synthetic sequence
ctatcacaggcac

SEQ ID NO: 15420 - DNA, 13 bp, Artificial Sequence
  synthetic sequence
cccagatggatgc

SEQ ID NO: 15421 - DNA, 13 bp, Artificial Sequence
  synthetic sequence
cctgtgaaaatga

SEQ ID NO: 15422 - DNA, 13 bp, Artificial Sequence
  synthetic sequence
acgcggtcgagat

SEQ ID NO: 15423 - DNA, 13 bp, Artificial Sequence
  synthetic sequence
agataccgtggct

SEQ ID NO: 15424 - DNA, 13 bp, Artificial Sequence
  synthetic sequence
tgtcgcgaaggca

SEQ ID NO: 15425 - DNA, 13 bp, Artificial Sequence
  synthetic sequence
tgcgtgtacgtcc

SEQ ID NO: 15426 - DNA, 13 bp, Artificial Sequence
  synthetic sequence
cagctggttgcgc

SEQ ID NO: 15427 - DNA, 13 bp, Artificial Sequence
  synthetic sequence
ttagtgtagagca

SEQ ID NO: 15428 - DNA, 13 bp, Artificial Sequence
  synthetic sequence
tcgctctctccag

SEQ ID NO: 15429 - DNA, 13 bp, Artificial Sequence
  synthetic sequence
acccgctcgacta

SEQ ID NO: 15430 - DNA, 13 bp, Artificial Sequence
  synthetic sequence
gtgacgctgaata

SEQ ID NO: 15431 - DNA, 13 bp, Artificial Sequence
  synthetic sequence
aaatcggcgtttt

SEQ ID NO: 15432 - DNA, 13 bp, Artificial Sequence
  synthetic sequence
ccgataggcagcc

SEQ ID NO: 15433 - DNA, 13 bp, Artificial Sequence
  synthetic sequence
tggctcagctgga

SEQ ID NO: 15434 - DNA, 13 bp, Artificial Sequence
  synthetic sequence
caaaggttgccct

SEQ ID NO: 15435 - DNA, 13 bp, Artificial Sequence
  synthetic sequence
tcacttcgttcgc

SEQ ID NO: 15436 - DNA, 13 bp, Artificial Sequence
  synthetic sequence
ggtgatcgccgac

SEQ ID NO: 15437 - DNA, 13 bp, Artificial Sequence
  synthetic sequence
ttcggtcagctcg

SEQ ID NO: 15438 - DNA, 13 bp, Artificial Sequence
  synthetic sequence
gtcgattgagctg

SEQ ID NO: 15439 - DNA, 13 bp, Artificial Sequence
  synthetic sequence
ccatggcggggat

SEQ ID NO: 15440 - DNA, 13 bp, Artificial Sequence
  synthetic sequence
ctgttgcaaagcc

SEQ ID NO: 15441 - DNA, 13 bp, Artificial Sequence
  synthetic sequence
ggtacaagatata

SEQ ID NO: 15442 - DNA, 13 bp, Artificial Sequence
  synthetic sequence
cgttcatcgtcag

SEQ ID NO: 15443 - DNA, 13 bp, Artificial Sequence
  synthetic sequence
gctgcgccgtaac

SEQ ID NO: 15444 - DNA, 13 bp, Artificial Sequence
  synthetic sequence
gcgagttaaacac

SEQ ID NO: 15445 - DNA, 13 bp, Artificial Sequence
  synthetic sequence
tcactttgaacat

SEQ ID NO: 15446 - DNA, 13 bp, Artificial Sequence
  synthetic sequence
ggccaggtcatca

SEQ ID NO: 15447 - DNA, 13 bp, Artificial Sequence
  synthetic sequence
tgaaagagcctgg

SEQ ID NO: 15448 - DNA, 13 bp, Artificial Sequence
  synthetic sequence
ccgatctgggtga

SEQ ID NO: 15449 - DNA, 13 bp, Artificial Sequence
  synthetic sequence
taagcgtcccaga

SEQ ID NO: 15450 - DNA, 13 bp, Artificial Sequence
  synthetic sequence
caagcggcgctat

SEQ ID NO: 15451 - DNA, 13 bp, Artificial Sequence
  synthetic sequence
atatgaacagtat

SEQ ID NO: 15452 - DNA, 13 bp, Artificial Sequence
  synthetic sequence
ctcattagagcaa

SEQ ID NO: 15453 - DNA, 13 bp, Artificial Sequence
  synthetic sequence
catcgatacgccg

SEQ ID NO: 15454 - DNA, 13 bp, Artificial Sequence
  synthetic sequence
gtgcctttccagg

SEQ ID NO: 15455 - DNA, 13 bp, Artificial Sequence
  synthetic sequence
ctgtgaaaccgcc

SEQ ID NO: 15456 - DNA, 13 bp, Artificial Sequence
  synthetic sequence
gccgattggtgct

SEQ ID NO: 15457 - DNA, 13 bp, Artificial Sequence
  synthetic sequence
tctctggcactga

SEQ ID NO: 15458 - DNA, 13 bp, Artificial Sequence
  synthetic sequence
tcctgaagcgcat

SEQ ID NO: 15459 - DNA, 13 bp, Artificial Sequence
  synthetic sequence
acggcagaagagc

SEQ ID NO: 15460 - DNA, 13 bp, Artificial Sequence
  synthetic sequence
tccagcatttcca

SEQ ID NO: 15461 - DNA, 13 bp, Artificial Sequence
  synthetic sequence
gatggcaaggcac

SEQ ID NO: 15462 - DNA, 13 bp, Artificial Sequence
  synthetic sequence
tctcggtctacgc

SEQ ID NO: 15463 - DNA, 13 bp, Artificial Sequence
  synthetic sequence
ggcctttcaccgg

SEQ ID NO: 15464 - DNA, 13 bp, Artificial Sequence
  synthetic sequence
tcaaccaactaaa

SEQ ID NO: 15465 - DNA, 13 bp, Artificial Sequence
  synthetic sequence
gacggtaaagcgg

SEQ ID NO: 15466 - DNA, 13 bp, Artificial Sequence
  synthetic sequence
tatggctcgccgc

SEQ ID NO: 15467 - DNA, 13 bp, Artificial Sequence
  synthetic sequence
ggtaagctcggtg

SEQ ID NO: 15468 - DNA, 13 bp, Artificial Sequence
  synthetic sequence
actcaaacctatg

SEQ ID NO: 15469 - DNA, 13 bp, Artificial Sequence
  synthetic sequence
gatgtcctgcagc

SEQ ID NO: 15470 - DNA, 13 bp, Artificial Sequence
  synthetic sequence
cgcaaacctgctt

SEQ ID NO: 15471 - DNA, 13 bp, Artificial Sequence
  synthetic sequence
acccttcacctaa

SEQ ID NO: 15472 - DNA, 13 bp, Artificial Sequence
  synthetic sequence
acgtagagcgctg

SEQ ID NO: 15473 - DNA, 13 bp, Artificial Sequence
  synthetic sequence
acctaatatggct

SEQ ID NO: 15474 - DNA, 13 bp, Artificial Sequence
  synthetic sequence
tcatatcatgacc

SEQ ID NO: 15475 - DNA, 13 bp, Artificial Sequence
  synthetic sequence
tgccgatcatcag

SEQ ID NO: 15476 - DNA, 13 bp, Artificial Sequence
  synthetic sequence
ttaagagaagaac

SEQ ID NO: 15477 - DNA, 13 bp, Artificial Sequence
  synthetic sequence
gatacactacata

SEQ ID NO: 15478 - DNA, 13 bp, Artificial Sequence
  synthetic sequence
aggggcatcatga

SEQ ID NO: 15479 - DNA, 13 bp, Artificial Sequence
  synthetic sequence
ccgcgactggaac

SEQ ID NO: 15480 - DNA, 13 bp, Artificial Sequence
  synthetic sequence
aagctttacggcc

SEQ ID NO: 15481 - DNA, 13 bp, Artificial Sequence
  synthetic sequence
gacatggtgccac

SEQ ID NO: 15482 - DNA, 13 bp, Artificial Sequence
  synthetic sequence
cggctcggtcatt

SEQ ID NO: 15483 - DNA, 13 bp, Artificial Sequence
  synthetic sequence
gcctacgcctatg

SEQ ID NO: 15484 - DNA, 13 bp, Artificial Sequence
  synthetic sequence
gcttcacctaaaa

SEQ ID NO: 15485 - DNA, 13 bp, Artificial Sequence
  synthetic sequence
taaatccagccag

SEQ ID NO: 15486 - DNA, 13 bp, Artificial Sequence
  synthetic sequence
ccaagcatcgact

SEQ ID NO: 15487 - DNA, 13 bp, Artificial Sequence
  synthetic sequence
aatatcagtactg

SEQ ID NO: 15488 - DNA, 13 bp, Artificial Sequence
  synthetic sequence
gttgtaacgttca

SEQ ID NO: 15489 - DNA, 13 bp, Artificial Sequence
  synthetic sequence
ggatgccttaaca

SEQ ID NO: 15490 - DNA, 13 bp, Artificial Sequence
  synthetic sequence
ttggtggtgcaat

SEQ ID NO: 15491 - DNA, 13 bp, Artificial Sequence
  synthetic sequence
atgcccggcaaat

SEQ ID NO: 15492 - DNA, 13 bp, Artificial Sequence
  synthetic sequence
accctattaactt

SEQ ID NO: 15493 - DNA, 13 bp, Artificial Sequence
  synthetic sequence
atcagcaagaacc

SEQ ID NO: 15494 - DNA, 13 bp, Artificial Sequence
  synthetic sequence
cacaggcgcaaca

SEQ ID NO: 15495 - DNA, 13 bp, Artificial Sequence
  synthetic sequence
ttgcggcgcaaaa

SEQ ID NO: 15496 - DNA, 13 bp, Artificial Sequence
  synthetic sequence
tattatctacagc

SEQ ID NO: 15497 - DNA, 13 bp, Artificial Sequence
  synthetic sequence
tggtcgaaacctc

SEQ ID NO: 15498 - DNA, 13 bp, Artificial Sequence
  synthetic sequence
gactgtaattctg

SEQ ID NO: 15499 - DNA, 13 bp, Artificial Sequence
  synthetic sequence
cttagatcagcaa

SEQ ID NO: 15500 - DNA, 13 bp, Artificial Sequence
  synthetic sequence
ggaattggctacc

SEQ ID NO: 15501 - DNA, 13 bp, Artificial Sequence
  synthetic sequence
tgatctgaaagta

SEQ ID NO: 15502 - DNA, 13 bp, Artificial Sequence
  synthetic sequence
accagcacgagat

SEQ ID NO: 15503 - DNA, 13 bp, Artificial Sequence
  synthetic sequence
acatgaccgcctc

SEQ ID NO: 15504 - DNA, 13 bp, Artificial Sequence
  synthetic sequence
acgacttcacgac

SEQ ID NO: 15505 - DNA, 13 bp, Artificial Sequence
  synthetic sequence
cccttggtgggtc

SEQ ID NO: 15506 - DNA, 13 bp, Artificial Sequence
  synthetic sequence
tgctgcagggctg

SEQ ID NO: 15507 - DNA, 13 bp, Artificial Sequence
  synthetic sequence
agtggatctacgg

SEQ ID NO: 15508 - DNA, 13 bp, Artificial Sequence
  synthetic sequence
tgcccgcgaacat

SEQ ID NO: 15509 - DNA, 13 bp, Artificial Sequence
  synthetic sequence
cggtaagctgtct

SEQ ID NO: 15510 - DNA, 13 bp, Artificial Sequence
  synthetic sequence
ggcctgcatacac

SEQ ID NO: 15511 - DNA, 13 bp, Artificial Sequence
  synthetic sequence
ctcggggttgtca

SEQ ID NO: 15512 - DNA, 13 bp, Artificial Sequence
  synthetic sequence
ataccattgatgt

SEQ ID NO: 15513 - DNA, 13 bp, Artificial Sequence
  synthetic sequence
gatatcgcgagcc

SEQ ID NO: 15514 - DNA, 13 bp, Artificial Sequence
  synthetic sequence
atcttggcggcac

SEQ ID NO: 15515 - DNA, 13 bp, Artificial Sequence
  synthetic sequence
tacccgtcggttt

SEQ ID NO: 15516 - DNA, 13 bp, Artificial Sequence
  synthetic sequence
tcaccgctaccgt

SEQ ID NO: 15517 - DNA, 13 bp, Artificial Sequence
  synthetic sequence
tggtcttgagccg

SEQ ID NO: 15518 - DNA, 13 bp, Artificial Sequence
  synthetic sequence
actatatttctgg

SEQ ID NO: 15519 - DNA, 13 bp, Artificial Sequence
  synthetic sequence
gtagacacgaaag

SEQ ID NO: 15520 - DNA, 13 bp, Artificial Sequence
  synthetic sequence
catagagatgata

SEQ ID NO: 15521 - DNA, 13 bp, Artificial Sequence
  synthetic sequence
cctttatcggttt

SEQ ID NO: 15522 - DNA, 13 bp, Artificial Sequence
  synthetic sequence
cagcgtttgctgc

SEQ ID NO: 15523 - DNA, 13 bp, Artificial Sequence
  synthetic sequence
ggcttatcgcatc

SEQ ID NO: 15524 - DNA, 13 bp, Artificial Sequence
  synthetic sequence
atcacccagctta

SEQ ID NO: 15525 - DNA, 13 bp, Artificial Sequence
  synthetic sequence
cctggccgtctac

SEQ ID NO: 15526 - DNA, 13 bp, Artificial Sequence
  synthetic sequence
tagccatcttgtt

SEQ ID NO: 15527 - DNA, 13 bp, Artificial Sequence
  synthetic sequence
tatgattggatgt

SEQ ID NO: 15528 - DNA, 13 bp, Artificial Sequence
  synthetic sequence
ccgccttgtaata

SEQ ID NO: 15529 - DNA, 13 bp, Artificial Sequence
  synthetic sequence
ggaataccagcaa

SEQ ID NO: 15530 - DNA, 13 bp, Artificial Sequence
  synthetic sequence
tgatattagtgta

SEQ ID NO: 15531 - DNA, 13 bp, Artificial Sequence
  synthetic sequence
tggactcggtgtt

SEQ ID NO: 15532 - DNA, 13 bp, Artificial Sequence
  synthetic sequence
acccatagtttca

SEQ ID NO: 15533 - DNA, 13 bp, Artificial Sequence
  synthetic sequence
tatgccgcaccca

SEQ ID NO: 15534 - DNA, 13 bp, Artificial Sequence
  synthetic sequence
ataaagcccttgc

SEQ ID NO: 15535 - DNA, 13 bp, Artificial Sequence
  synthetic sequence
tttatgtgcaatt

SEQ ID NO: 15536 - DNA, 13 bp, Artificial Sequence
  synthetic sequence
gccttacggtggc

SEQ ID NO: 15537 - DNA, 13 bp, Artificial Sequence
  synthetic sequence
caggaggtccttc

SEQ ID NO: 15538 - DNA, 13 bp, Artificial Sequence
  synthetic sequence
ctgcgttcgaccc

SEQ ID NO: 15539 - DNA, 13 bp, Artificial Sequence
  synthetic sequence
cgcttcgctcgac

SEQ ID NO: 15540 - DNA, 13 bp, Artificial Sequence
  synthetic sequence
ccttcttctacag

SEQ ID NO: 15541 - DNA, 13 bp, Artificial Sequence
  synthetic sequence
ttttgacggctgc

SEQ ID NO: 15542 - DNA, 13 bp, Artificial Sequence
  synthetic sequence
caccatcccgaac

SEQ ID NO: 15543 - DNA, 13 bp, Artificial Sequence
  synthetic sequence
aaatcaggatttt

SEQ ID NO: 15544 - DNA, 13 bp, Artificial Sequence
  synthetic sequence
atacctgaataat

SEQ ID NO: 15545 - DNA, 13 bp, Artificial Sequence
  synthetic sequence
ataaaactagaag

SEQ ID NO: 15546 - DNA, 13 bp, Artificial Sequence
  synthetic sequence
gacctttgccgtc

SEQ ID NO: 15547 - DNA, 13 bp, Artificial Sequence
  synthetic sequence
agaaagtcatcat

SEQ ID NO: 15548 - DNA, 13 bp, Artificial Sequence
  synthetic sequence
gaatcgaccagct

SEQ ID NO: 15549 - DNA, 13 bp, Artificial Sequence
  synthetic sequence
gcatctcccagcc

SEQ ID NO: 15550 - DNA, 13 bp, Artificial Sequence
  synthetic sequence
ccatcgttggcaa

SEQ ID NO: 15551 - DNA, 13 bp, Artificial Sequence
  synthetic sequence
ctttatcagataa

SEQ ID NO: 15552 - DNA, 13 bp, Artificial Sequence
  synthetic sequence
tcatttggatcat

SEQ ID NO: 15553 - DNA, 13 bp, Artificial Sequence
  synthetic sequence
gtcagcgagttga

SEQ ID NO: 15554 - DNA, 13 bp, Artificial Sequence
  synthetic sequence
tatacttgccttt

SEQ ID NO: 15555 - DNA, 13 bp, Artificial Sequence
  synthetic sequence
cgtcgaaaccatc

SEQ ID NO: 15556 - DNA, 13 bp, Artificial Sequence
  synthetic sequence
gactgattgttag

SEQ ID NO: 15557 - DNA, 13 bp, Artificial Sequence
  synthetic sequence
atccagatacgca

SEQ ID NO: 15558 - DNA, 13 bp, Artificial Sequence
  synthetic sequence
acatcccaatctc

SEQ ID NO: 15559 - DNA, 13 bp, Artificial Sequence
  synthetic sequence
ccatcattggcaa

SEQ ID NO: 15560 - DNA, 13 bp, Artificial Sequence
  synthetic sequence
ggtctcagcagtc

SEQ ID NO: 15561 - DNA, 13 bp, Artificial Sequence
  synthetic sequence
cgtcccaatctcg

SEQ ID NO: 15562 - DNA, 13 bp, Artificial Sequence
  synthetic sequence
atccatctgagtt

SEQ ID NO: 15563 - DNA, 13 bp, Artificial Sequence
  synthetic sequence
ccgaacagcgaca

SEQ ID NO: 15564 - DNA, 13 bp, Artificial Sequence
  synthetic sequence
ttcgctgtctgcc

SEQ ID NO: 15565 - DNA, 13 bp, Artificial Sequence
  synthetic sequence
gataaccagcggc

SEQ ID NO: 15566 - DNA, 13 bp, Artificial Sequence
  synthetic sequence
cgcccatgatgaa

SEQ ID NO: 15567 - DNA, 13 bp, Artificial Sequence
  synthetic sequence
ggaatttcttcta

SEQ ID NO: 15568 - DNA, 13 bp, Artificial Sequence
  synthetic sequence
acgacttcaaccg

SEQ ID NO: 15569 - DNA, 13 bp, Artificial Sequence
  synthetic sequence
ttaactcactact

SEQ ID NO: 15570 - DNA, 13 bp, Artificial Sequence
  synthetic sequence
attcttgaataca

SEQ ID NO: 15571 - DNA, 13 bp, Artificial Sequence
  synthetic sequence
cccacacctaaat

SEQ ID NO: 15572 - DNA, 13 bp, Artificial Sequence
  synthetic sequence
acagattttacag

SEQ ID NO: 15573 - DNA, 13 bp, Artificial Sequence
  synthetic sequence
ttcctggtgatgt

SEQ ID NO: 15574 - DNA, 13 bp, Artificial Sequence
  synthetic sequence
atgtactttcctt

SEQ ID NO: 15575 - DNA, 13 bp, Artificial Sequence
  synthetic sequence
gatggcgttcttc

SEQ ID NO: 15576 - DNA, 13 bp, Artificial Sequence
  synthetic sequence
ccaacgttacttg

SEQ ID NO: 15577 - DNA, 13 bp, Artificial Sequence
  synthetic sequence
tcctcgatctgca

SEQ ID NO: 15578 - DNA, 13 bp, Artificial Sequence
  synthetic sequence
cagtttcatgaaa

SEQ ID NO: 15579 - DNA, 13 bp, Artificial Sequence
  synthetic sequence
gttcctgttccca

SEQ ID NO: 15580 - DNA, 13 bp, Artificial Sequence
  synthetic sequence
tacgcacaccgat

SEQ ID NO: 15581 - DNA, 13 bp, Artificial Sequence
  synthetic sequence
gcgtgggtgatcg

SEQ ID NO: 15582 - DNA, 13 bp, Artificial Sequence
  synthetic sequence
ctttctgcgtacg

SEQ ID NO: 15583 - DNA, 13 bp, Artificial Sequence
  synthetic sequence
attaggcagtaag

SEQ ID NO: 15584 - DNA, 13 bp, Artificial Sequence
  synthetic sequence
caaactatagcaa

SEQ ID NO: 15585 - DNA, 13 bp, Artificial Sequence
  synthetic sequence
accatctgaccat

SEQ ID NO: 15586 - DNA, 13 bp, Artificial Sequence
  synthetic sequence
ggccgatcttcgc

SEQ ID NO: 15587 - DNA, 13 bp, Artificial Sequence
  synthetic sequence
ctcctttcaaaat

SEQ ID NO: 15588 - DNA, 13 bp, Artificial Sequence
  synthetic sequence
ccatgccgaacat

SEQ ID NO: 15589 - DNA, 13 bp, Artificial Sequence
  synthetic sequence
accttatctatac

SEQ ID NO: 15590 - DNA, 13 bp, Artificial Sequence
  synthetic sequence
agcccgctccaag

SEQ ID NO: 15591 - DNA, 13 bp, Artificial Sequence
  synthetic sequence
gttacatacaaga

SEQ ID NO: 15592 - DNA, 13 bp, Artificial Sequence
  synthetic sequence
caagaatgcgcca

SEQ ID NO: 15593 - DNA, 13 bp, Artificial Sequence
  synthetic sequence
accagcgcgcctt

SEQ ID NO: 15594 - DNA, 13 bp, Artificial Sequence
  synthetic sequence
ttctgcggatcga

SEQ ID NO: 15595 - DNA, 13 bp, Artificial Sequence
  synthetic sequence
gcggtcttgttcg

SEQ ID NO: 15596 - DNA, 13 bp, Artificial Sequence
  synthetic sequence
atctctgtgattt

SEQ ID NO: 15597 - DNA, 13 bp, Artificial Sequence
  synthetic sequence
ttgcctctgcaat

SEQ ID NO: 15598 - DNA, 13 bp, Artificial Sequence
  synthetic sequence
agttctacaagca

SEQ ID NO: 15599 - DNA, 13 bp, Artificial Sequence
  synthetic sequence
cttcagccgcctc

SEQ ID NO: 15600 - DNA, 13 bp, Artificial Sequence
  synthetic sequence
ggcaccatctcgc

SEQ ID NO: 15601 - DNA, 13 bp, Artificial Sequence
  synthetic sequence
gccggcttgttgt

SEQ ID NO: 15602 - DNA, 13 bp, Artificial Sequence
  synthetic sequence
accagctctcata

SEQ ID NO: 15603 - DNA, 13 bp, Artificial Sequence
  synthetic sequence
aggaacacgagca

SEQ ID NO: 15604 - DNA, 13 bp, Artificial Sequence
  synthetic sequence
tagcatctcccat

SEQ ID NO: 15605 - DNA, 13 bp, Artificial Sequence
  synthetic sequence
ccatcttcatttt

SEQ ID NO: 15606 - DNA, 13 bp, Artificial Sequence
  synthetic sequence
agccagatacgca

SEQ ID NO: 15607 - DNA, 13 bp, Artificial Sequence
  synthetic sequence
tataaattttggc

SEQ ID NO: 15608 - DNA, 13 bp, Artificial Sequence
  synthetic sequence
ctgggtctccatg

SEQ ID NO: 15609 - DNA, 13 bp, Artificial Sequence
  synthetic sequence
ctgcgtggcaaaa

SEQ ID NO: 15610 - DNA, 13 bp, Artificial Sequence
  synthetic sequence
ggcctgctcatag

SEQ ID NO: 15611 - DNA, 13 bp, Artificial Sequence
  synthetic sequence
aaaggcgaatata

SEQ ID NO: 15612 - DNA, 13 bp, Artificial Sequence
  synthetic sequence
atgttacgcagca

SEQ ID NO: 15613 - DNA, 13 bp, Artificial Sequence
  synthetic sequence
gcgatatactttt

SEQ ID NO: 15614 - DNA, 13 bp, Artificial Sequence
  synthetic sequence
accatttagcaaa

SEQ ID NO: 15615 - DNA, 13 bp, Artificial Sequence
  synthetic sequence
aacgtttgaaata

SEQ ID NO: 15616 - DNA, 13 bp, Artificial Sequence
  synthetic sequence
gcaggatgtcgtc

SEQ ID NO: 15617 - DNA, 13 bp, Artificial Sequence
  synthetic sequence
aatcttacagtcc

SEQ ID NO: 15618 - DNA, 13 bp, Artificial Sequence
  synthetic sequence
tgtcctatcagga

SEQ ID NO: 15619 - DNA, 13 bp, Artificial Sequence
  synthetic sequence
tggaccgacctga

SEQ ID NO: 15620 - DNA, 13 bp, Artificial Sequence
  synthetic sequence
taaatatttcctg

SEQ ID NO: 15621 - DNA, 13 bp, Artificial Sequence
  synthetic sequence
acttcgcctgggt

SEQ ID NO: 15622 - DNA, 13 bp, Artificial Sequence
  synthetic sequence
acacccatgatga

SEQ ID NO: 15623 - DNA, 13 bp, Artificial Sequence
  synthetic sequence
tacctgcgcctgc

SEQ ID NO: 15624 - DNA, 13 bp, Artificial Sequence
  synthetic sequence
gccagcaccagga

SEQ ID NO: 15625 - DNA, 13 bp, Artificial Sequence
  synthetic sequence
ccgacatcgaaac

SEQ ID NO: 15626 - DNA, 13 bp, Artificial Sequence
  synthetic sequence
acgactttatcga

SEQ ID NO: 15627 - DNA, 13 bp, Artificial Sequence
  synthetic sequence
gtttgaaccatgt

SEQ ID NO: 15628 - DNA, 13 bp, Artificial Sequence
  synthetic sequence
ttcgttatttaca

SEQ ID NO: 15629 - DNA, 13 bp, Artificial Sequence
  synthetic sequence
tcatcgcctcttc

SEQ ID NO: 15630 - DNA, 13 bp, Artificial Sequence
  synthetic sequence
ttgatgtttggtg

SEQ ID NO: 15631 - DNA, 13 bp, Artificial Sequence
  synthetic sequence
tggccgatctgct

SEQ ID NO: 15632 - DNA, 13 bp, Artificial Sequence
  synthetic sequence
gtgatgttctggc

SEQ ID NO: 15633 - DNA, 13 bp, Artificial Sequence
  synthetic sequence
cagctttcataca

SEQ ID NO: 15634 - DNA, 13 bp, Artificial Sequence
  synthetic sequence
caacaggtaatga

SEQ ID NO: 15635 - DNA, 13 bp, Artificial Sequence
  synthetic sequence
ttatcacttggga

SEQ ID NO: 15636 - DNA, 13 bp, Artificial Sequence
  synthetic sequence
ggttacgcgcctg

SEQ ID NO: 15637 - DNA, 13 bp, Artificial Sequence
  synthetic sequence
acaattgctaccg

SEQ ID NO: 15638 - DNA, 13 bp, Artificial Sequence
  synthetic sequence
tcaccaccatgat

SEQ ID NO: 15639 - DNA, 13 bp, Artificial Sequence
  synthetic sequence
cgtttccttgaac

SEQ ID NO: 15640 - DNA, 13 bp, Artificial Sequence
  synthetic sequence
cggcggccatgat

SEQ ID NO: 15641 - DNA, 13 bp, Artificial Sequence
  synthetic sequence
cagcgcgctgcaa

SEQ ID NO: 15642 - DNA, 13 bp, Artificial Sequence
  synthetic sequence
gggtgatgcggtt

SEQ ID NO: 15643 - DNA, 13 bp, Artificial Sequence
  synthetic sequence
gacgtgcgcgaac

SEQ ID NO: 15644 - DNA, 13 bp, Artificial Sequence
  synthetic sequence
tatagatcgccct

SEQ ID NO: 15645 - DNA, 13 bp, Artificial Sequence
  synthetic sequence
gtttccttggcca

SEQ ID NO: 15646 - DNA, 13 bp, Artificial Sequence
  synthetic sequence
agcaaactcattc

SEQ ID NO: 15647 - DNA, 13 bp, Artificial Sequence
  synthetic sequence
aaatgtaattggt

SEQ ID NO: 15648 - DNA, 13 bp, Artificial Sequence
  synthetic sequence
cggcgatcttcag

SEQ ID NO: 15649 - DNA, 13 bp, Artificial Sequence
  synthetic sequence
gcaaatgaagaaa

SEQ ID NO: 15650 - DNA, 13 bp, Artificial Sequence
  synthetic sequence
gggtttccataaa

SEQ ID NO: 15651 - DNA, 13 bp, Artificial Sequence
  synthetic sequence
ataaactggaaac

SEQ ID NO: 15652 - DNA, 13 bp, Artificial Sequence
  synthetic sequence
ttcaatggtatat

SEQ ID NO: 15653 - DNA, 13 bp, Artificial Sequence
  synthetic sequence
ttccatgaataga

SEQ ID NO: 15654 - DNA, 13 bp, Artificial Sequence
  synthetic sequence
ctgttcgctattg

SEQ ID NO: 15655 - DNA, 13 bp, Artificial Sequence
  synthetic sequence
aggtcgcggtcat

SEQ ID NO: 15656 - DNA, 13 bp, Artificial Sequence
  synthetic sequence
agaaccaaccaag

SEQ ID NO: 15657 - DNA, 13 bp, Artificial Sequence
  synthetic sequence
catcacgccaaac

SEQ ID NO: 15658 - DNA, 13 bp, Artificial Sequence
  synthetic sequence
gataccttaccgc

SEQ ID NO: 15659 - DNA, 13 bp, Artificial Sequence
  synthetic sequence
tcggtgcggtcca

SEQ ID NO: 15660 - DNA, 13 bp, Artificial Sequence
  synthetic sequence
tgcttaatcagtg

SEQ ID NO: 15661 - DNA, 13 bp, Artificial Sequence
  synthetic sequence
cttttgccagatt

SEQ ID NO: 15662 - DNA, 13 bp, Artificial Sequence
  synthetic sequence
cagcggattataa

SEQ ID NO: 15663 - DNA, 13 bp, Artificial Sequence
  synthetic sequence
cagacgatggcat

SEQ ID NO: 15664 - DNA, 13 bp, Artificial Sequence
  synthetic sequence
gacattcaacgcc

SEQ ID NO: 15665 - DNA, 13 bp, Artificial Sequence
  synthetic sequence
tctcgcctttcac

SEQ ID NO: 15666 - DNA, 13 bp, Artificial Sequence
  synthetic sequence
ctccatgaccagg

SEQ ID NO: 15667 - DNA, 13 bp, Artificial Sequence
  synthetic sequence
cattggaacagct

SEQ ID NO: 15668 - DNA, 13 bp, Artificial Sequence
  synthetic sequence
gtctgcgccatcg

SEQ ID NO: 15669 - DNA, 13 bp, Artificial Sequence
  synthetic sequence
cccgactagataa

SEQ ID NO: 15670 - DNA, 13 bp, Artificial Sequence
  synthetic sequence
ccatgtgcggctt

SEQ ID NO: 15671 - DNA, 13 bp, Artificial Sequence
  synthetic sequence
gcgcgagcttgat

SEQ ID NO: 15672 - DNA, 13 bp, Artificial Sequence
  synthetic sequence
acgacttcaccaa

SEQ ID NO: 15673 - DNA, 13 bp, Artificial Sequence
  synthetic sequence
accgatcgttctg

SEQ ID NO: 15674 - DNA, 13 bp, Artificial Sequence
  synthetic sequence
gcatttcccagcc

SEQ ID NO: 15675 - DNA, 13 bp, Artificial Sequence
  synthetic sequence
tatgtggtagaga

SEQ ID NO: 15676 - DNA, 13 bp, Artificial Sequence
  synthetic sequence
gggtatggttcgt

SEQ ID NO: 15677 - DNA, 13 bp, Artificial Sequence
  synthetic sequence
taaacagcctcca

SEQ ID NO: 15678 - DNA, 13 bp, Artificial Sequence
  synthetic sequence
agcttggccgggt

SEQ ID NO: 15679 - DNA, 13 bp, Artificial Sequence
  synthetic sequence
tctggcatcgcca

SEQ ID NO: 15680 - DNA, 13 bp, Artificial Sequence
  synthetic sequence
aggtgctggtgga

SEQ ID NO: 15681 - DNA, 13 bp, Artificial Sequence
  synthetic sequence
accaccacaaaga

SEQ ID NO: 15682 - DNA, 13 bp, Artificial Sequence
  synthetic sequence
cttctcggtggca

SEQ ID NO: 15683 - DNA, 13 bp, Artificial Sequence
  synthetic sequence
cgcaggttatcga

SEQ ID NO: 15684 - DNA, 13 bp, Artificial Sequence
  synthetic sequence
tgattatcacgtt

SEQ ID NO: 15685 - DNA, 13 bp, Artificial Sequence
  synthetic sequence
gctgcatctttag

SEQ ID NO: 15686 - DNA, 13 bp, Artificial Sequence
  synthetic sequence
acgatatcgctat

SEQ ID NO: 15687 - DNA, 13 bp, Artificial Sequence
  synthetic sequence
cccttcggtcacg

SEQ ID NO: 15688 - DNA, 13 bp, Artificial Sequence
  synthetic sequence
ccaagacgttcca

SEQ ID NO: 15689 - DNA, 13 bp, Artificial Sequence
  synthetic sequence
acttggtttgttc

SEQ ID NO: 15690 - DNA, 13 bp, Artificial Sequence
  synthetic sequence
ttttctttccaaa

SEQ ID NO: 15691 - DNA, 13 bp, Artificial Sequence
  synthetic sequence
tggagcaggccat

SEQ ID NO: 15692 - DNA, 13 bp, Artificial Sequence
  synthetic sequence
ggttgccacggtc

SEQ ID NO: 15693 - DNA, 13 bp, Artificial Sequence
  synthetic sequence
cgcgcgctgatga

SEQ ID NO: 15694 - DNA, 13 bp, Artificial Sequence
  synthetic sequence
tggttcccgcagg

SEQ ID NO: 15695 - DNA, 13 bp, Artificial Sequence
  synthetic sequence
tcaacacccttaa

SEQ ID NO: 15696 - DNA, 13 bp, Artificial Sequence
  synthetic sequence
catggttccataa

SEQ ID NO: 15697 - DNA, 13 bp, Artificial Sequence
  synthetic sequence
ccgatggccttct

SEQ ID NO: 15698 - DNA, 13 bp, Artificial Sequence
  synthetic sequence
ccaccttcacgcg

SEQ ID NO: 15699 - DNA, 13 bp, Artificial Sequence
  synthetic sequence
acagcacgatgtc

SEQ ID NO: 15700 - DNA, 13 bp, Artificial Sequence
  synthetic sequence
cccagcacccagt

SEQ ID NO: 15701 - DNA, 13 bp, Artificial Sequence
  synthetic sequence
aaaaccaacctgg

SEQ ID NO: 15702 - DNA, 13 bp, Artificial Sequence
  synthetic sequence
tcggtgcggtcga

SEQ ID NO: 15703 - DNA, 13 bp, Artificial Sequence
  synthetic sequence
ggaacagcgcttc

SEQ ID NO: 15704 - DNA, 13 bp, Artificial Sequence
  synthetic sequence
acgtacttggctt

SEQ ID NO: 15705 - DNA, 13 bp, Artificial Sequence
  synthetic sequence
tcttcatcgatcg

SEQ ID NO: 15706 - DNA, 13 bp, Artificial Sequence
  synthetic sequence
ctttctgggcttc

SEQ ID NO: 15707 - DNA, 13 bp, Artificial Sequence
  synthetic sequence
agccatcacaaac

SEQ ID NO: 15708 - DNA, 13 bp, Artificial Sequence
  synthetic sequence
attgtcttgccga

SEQ ID NO: 15709 - DNA, 13 bp, Artificial Sequence
  synthetic sequence
cgaacagcatcac

SEQ ID NO: 15710 - DNA, 13 bp, Artificial Sequence
  synthetic sequence
tgcaggatcgcca

SEQ ID NO: 15711 - DNA, 13 bp, Artificial Sequence
  synthetic sequence
gacggaactgctg

SEQ ID NO: 15712 - DNA, 13 bp, Artificial Sequence
  synthetic sequence
acggatatgtatt

SEQ ID NO: 15713 - DNA, 13 bp, Artificial Sequence
  synthetic sequence
aagcagcaagcgc

SEQ ID NO: 15714 - DNA, 13 bp, Artificial Sequence
  synthetic sequence
agttcgccatctg

SEQ ID NO: 15715 - DNA, 13 bp, Artificial Sequence
  synthetic sequence
aggtcgttggtcg

SEQ ID NO: 15716 - DNA, 13 bp, Artificial Sequence
  synthetic sequence
aaaacgacgataa

SEQ ID NO: 15717 - DNA, 13 bp, Artificial Sequence
  synthetic sequence
attgaacgaccaa

SEQ ID NO: 15718 - DNA, 13 bp, Artificial Sequence
  synthetic sequence
tcggcatcaccct

SEQ ID NO: 15719 - DNA, 13 bp, Artificial Sequence
  synthetic sequence
gaaccaaataata

SEQ ID NO: 15720 - DNA, 13 bp, Artificial Sequence
  synthetic sequence
tgacggcattgct

SEQ ID NO: 15721 - DNA, 13 bp, Artificial Sequence
  synthetic sequence
tatctgttcctgc

SEQ ID NO: 15722 - DNA, 13 bp, Artificial Sequence
  synthetic sequence
gtgatgttcggct

SEQ ID NO: 15723 - DNA, 13 bp, Artificial Sequence
  synthetic sequence
gcctacgacgcca

SEQ ID NO: 15724 - DNA, 13 bp, Artificial Sequence
  synthetic sequence
gtctgcgtagtat

SEQ ID NO: 15725 - DNA, 13 bp, Artificial Sequence
  synthetic sequence
atcaccagcggca

SEQ ID NO: 15726 - DNA, 13 bp, Artificial Sequence
  synthetic sequence
atggtgttgttgc

SEQ ID NO: 15727 - DNA, 13 bp, Artificial Sequence
  synthetic sequence
aacgcagcggtgg

SEQ ID NO: 15728 - DNA, 13 bp, Artificial Sequence
  synthetic sequence
gccatcctacgca

SEQ ID NO: 15729 - DNA, 13 bp, Artificial Sequence
  synthetic sequence
ttatcaaccaagt

SEQ ID NO: 15730 - DNA, 13 bp, Artificial Sequence
  synthetic sequence
acaaataacttct

SEQ ID NO: 15731 - DNA, 13 bp, Artificial Sequence
  synthetic sequence
ttgctggaactgg

SEQ ID NO: 15732 - DNA, 13 bp, Artificial Sequence
  synthetic sequence
cgtaactctccca

SEQ ID NO: 15733 - DNA, 13 bp, Artificial Sequence
  synthetic sequence
cctgatgcgcttc

SEQ ID NO: 15734 - DNA, 13 bp, Artificial Sequence
  synthetic sequence
ggatcgacagcgg

SEQ ID NO: 15735 - DNA, 13 bp, Artificial Sequence
  synthetic sequence
tcttcttcggtca

SEQ ID NO: 15736 - DNA, 13 bp, Artificial Sequence
  synthetic sequence
tgacaatattatc

SEQ ID NO: 15737 - DNA, 13 bp, Artificial Sequence
  synthetic sequence
gcctggtcaatca

SEQ ID NO: 15738 - DNA, 13 bp, Artificial Sequence
  synthetic sequence
tcaatcagttcgg

SEQ ID NO: 15739 - DNA, 13 bp, Artificial Sequence
  synthetic sequence
aagcgatcagaca

SEQ ID NO: 15740 - DNA, 13 bp, Artificial Sequence
  synthetic sequence
tgacggtcgacac

SEQ ID NO: 15741 - DNA, 13 bp, Artificial Sequence
  synthetic sequence
ccccaaataacat

SEQ ID NO: 15742 - DNA, 13 bp, Artificial Sequence
  synthetic sequence
ggacataccactt

SEQ ID NO: 15743 - DNA, 13 bp, Artificial Sequence
  synthetic sequence
gttcatgcagaac

SEQ ID NO: 15744 - DNA, 13 bp, Artificial Sequence
  synthetic sequence
gccaacgaggacg

SEQ ID NO: 15745 - DNA, 13 bp, Artificial Sequence
  synthetic sequence
aaaggcacgaatc

SEQ ID NO: 15746 - DNA, 13 bp, Artificial Sequence
  synthetic sequence
cagtacctacaac

SEQ ID NO: 15747 - DNA, 13 bp, Artificial Sequence
  synthetic sequence
tggtcggggaaac

SEQ ID NO: 15748 - DNA, 13 bp, Artificial Sequence
  synthetic sequence
ccgttgatctgga

SEQ ID NO: 15749 - DNA, 13 bp, Artificial Sequence
  synthetic sequence
gccagcgacatcg

SEQ ID NO: 15750 - DNA, 13 bp, Artificial Sequence
  synthetic sequence
ccgaccggtttcg

SEQ ID NO: 15751 - DNA, 13 bp, Artificial Sequence
  synthetic sequence
gatggcactggtc

SEQ ID NO: 15752 - DNA, 13 bp, Artificial Sequence
  synthetic sequence
cagttgctggcgc

SEQ ID NO: 15753 - DNA, 13 bp, Artificial Sequence
  synthetic sequence
cttctgaaacata

SEQ ID NO: 15754 - DNA, 13 bp, Artificial Sequence
  synthetic sequence
ctgcgaaatttcg

SEQ ID NO: 15755 - DNA, 13 bp, Artificial Sequence
  synthetic sequence
aaacgcttcgggc

SEQ ID NO: 15756 - DNA, 13 bp, Artificial Sequence
  synthetic sequence
acgtcaacgatgg

SEQ ID NO: 15757 - DNA, 13 bp, Artificial Sequence
  synthetic sequence
catcaaaggttgg

SEQ ID NO: 15758 - DNA, 13 bp, Artificial Sequence
  synthetic sequence
ttcagtttcttga

SEQ ID NO: 15759 - DNA, 13 bp, Artificial Sequence
  synthetic sequence
agagtaagtagtt

SEQ ID NO: 15760 - DNA, 13 bp, Artificial Sequence
  synthetic sequence
tcattgacgtccc

SEQ ID NO: 15761 - DNA, 13 bp, Artificial Sequence
  synthetic sequence
ttgtttgaggtga

SEQ ID NO: 15762 - DNA, 13 bp, Artificial Sequence
  synthetic sequence
gtgatatgcacat

SEQ ID NO: 15763 - DNA, 13 bp, Artificial Sequence
  synthetic sequence
acttcgttcgcca

SEQ ID NO: 15764 - DNA, 13 bp, Artificial Sequence
  synthetic sequence
agttccggcatac

SEQ ID NO: 15765 - DNA, 13 bp, Artificial Sequence
  synthetic sequence
ggcgtcaggatca

SEQ ID NO: 15766 - DNA, 13 bp, Artificial Sequence
  synthetic sequence
cgcaggtcgtcga

SEQ ID NO: 15767 - DNA, 13 bp, Artificial Sequence
  synthetic sequence
aggaagatatcgc

SEQ ID NO: 15768 - DNA, 13 bp, Artificial Sequence
  synthetic sequence
atggtaaccatca

SEQ ID NO: 15769 - DNA, 13 bp, Artificial Sequence
  synthetic sequence
acctcaaaactgg

SEQ ID NO: 15770 - DNA, 13 bp, Artificial Sequence
  synthetic sequence
tagctggcgatca

SEQ ID NO: 15771 - DNA, 13 bp, Artificial Sequence
  synthetic sequence
atatgcactcgct

SEQ ID NO: 15772 - DNA, 13 bp, Artificial Sequence
  synthetic sequence
catatatttctct

SEQ ID NO: 15773 - DNA, 13 bp, Artificial Sequence
  synthetic sequence
cttcgtagccatt

SEQ ID NO: 15774 - DNA, 13 bp, Artificial Sequence
  synthetic sequence
cagaacgaatggt

SEQ ID NO: 15775 - DNA, 13 bp, Artificial Sequence
  synthetic sequence
ttgtcacctggtt

SEQ ID NO: 15776 - DNA, 13 bp, Artificial Sequence
  synthetic sequence
aaaagcggaaaac

SEQ ID NO: 15777 - DNA, 13 bp, Artificial Sequence
  synthetic sequence
accagcagatcct

SEQ ID NO: 15778 - DNA, 13 bp, Artificial Sequence
  synthetic sequence
tctttactagata

SEQ ID NO: 15779 - DNA, 13 bp, Artificial Sequence
  synthetic sequence
gtcctcccgcaaa

SEQ ID NO: 15780 - DNA, 13 bp, Artificial Sequence
  synthetic sequence
cgggatcgaccag

SEQ ID NO: 15781 - DNA, 13 bp, Artificial Sequence
  synthetic sequence
tttatccattatc

SEQ ID NO: 15782 - DNA, 13 bp, Artificial Sequence
  synthetic sequence
agaccgtgcagga

SEQ ID NO: 15783 - DNA, 13 bp, Artificial Sequence
  synthetic sequence
agtgctcgatcag

SEQ ID NO: 15784 - DNA, 13 bp, Artificial Sequence
  synthetic sequence
gctgcctgcagtt

SEQ ID NO: 15785 - DNA, 13 bp, Artificial Sequence
  synthetic sequence
accatcgccagca

SEQ ID NO: 15786 - DNA, 13 bp, Artificial Sequence
  synthetic sequence
acctcatccagca

SEQ ID NO: 15787 - DNA, 13 bp, Artificial Sequence
  synthetic sequence
gaacaaccgcgac

SEQ ID NO: 15788 - DNA, 13 bp, Artificial Sequence
  synthetic sequence
cagcgacaccacc

SEQ ID NO: 15789 - DNA, 13 bp, Artificial Sequence
  synthetic sequence
gactgagcgattt

SEQ ID NO: 15790 - DNA, 13 bp, Artificial Sequence
  synthetic sequence
gccagcatcacga

SEQ ID NO: 15791 - DNA, 13 bp, Artificial Sequence
  synthetic sequence
tgtgcaccagaac

SEQ ID NO: 15792 - DNA, 13 bp, Artificial Sequence
  synthetic sequence
acttccttgatca

SEQ ID NO: 15793 - DNA, 13 bp, Artificial Sequence
  synthetic sequence
actggaaaagaaa

SEQ ID NO: 15794 - DNA, 13 bp, Artificial Sequence
  synthetic sequence
attttcgccgccg

SEQ ID NO: 15795 - DNA, 13 bp, Artificial Sequence
  synthetic sequence
ttcaatctggtta

SEQ ID NO: 15796 - DNA, 13 bp, Artificial Sequence
  synthetic sequence
ttcgcctttaact

SEQ ID NO: 15797 - DNA, 13 bp, Artificial Sequence
  synthetic sequence
atgaatatcctcg

SEQ ID NO: 15798 - DNA, 13 bp, Artificial Sequence
  synthetic sequence
tcgccatggacct

SEQ ID NO: 15799 - DNA, 13 bp, Artificial Sequence
  synthetic sequence
atttgcgtcactt

SEQ ID NO: 15800 - DNA, 13 bp, Artificial Sequence
  synthetic sequence
aatacatcgcgac

SEQ ID NO: 15801 - DNA, 13 bp, Artificial Sequence
  synthetic sequence
gccatcttcaccg

SEQ ID NO: 15802 - DNA, 13 bp, Artificial Sequence
  synthetic sequence
acttcatcgaccg

SEQ ID NO: 15803 - DNA, 13 bp, Artificial Sequence
  synthetic sequence
cagcttgcgcagg

SEQ ID NO: 15804 - DNA, 13 bp, Artificial Sequence
  synthetic sequence
cgcttgcggcttg

SEQ ID NO: 15805 - DNA, 13 bp, Artificial Sequence
  synthetic sequence
tctcagttaaaca

SEQ ID NO: 15806 - DNA, 13 bp, Artificial Sequence
  synthetic sequence
gcgcaggacaagg

SEQ ID NO: 15807 - DNA, 13 bp, Artificial Sequence
  synthetic sequence
gcattgcataaga

SEQ ID NO: 15808 - DNA, 13 bp, Artificial Sequence
  synthetic sequence
tgtcgatggacac

SEQ ID NO: 15809 - DNA, 13 bp, Artificial Sequence
  synthetic sequence
aagatgtggctat

SEQ ID NO: 15810 - DNA, 13 bp, Artificial Sequence
  synthetic sequence
gatcattccgctg

SEQ ID NO: 15811 - DNA, 13 bp, Artificial Sequence
  synthetic sequence
gctgctgtaaatt

SEQ ID NO: 15812 - DNA, 13 bp, Artificial Sequence
  synthetic sequence
ccccgaatatcta

SEQ ID NO: 15813 - DNA, 13 bp, Artificial Sequence
  synthetic sequence
ccttatggtcaac

SEQ ID NO: 15814 - DNA, 13 bp, Artificial Sequence
  synthetic sequence
ctgctgaaggtga

SEQ ID NO: 15815 - DNA, 13 bp, Artificial Sequence
  synthetic sequence
acgctctgcatcg

SEQ ID NO: 15816 - DNA, 13 bp, Artificial Sequence
  synthetic sequence
gttaacccatttc

SEQ ID NO: 15817 - DNA, 13 bp, Artificial Sequence
  synthetic sequence
tgttcaccgagaa

SEQ ID NO: 15818 - DNA, 13 bp, Artificial Sequence
  synthetic sequence
gcagggttcatag

SEQ ID NO: 15819 - DNA, 13 bp, Artificial Sequence
  synthetic sequence
ctttctgggtacg

SEQ ID NO: 15820 - DNA, 13 bp, Artificial Sequence
  synthetic sequence
aacgcctgaaggt

SEQ ID NO: 15821 - DNA, 13 bp, Artificial Sequence
  synthetic sequence
gaaaagagtattt

SEQ ID NO: 15822 - DNA, 13 bp, Artificial Sequence
  synthetic sequence
agcctgcagcagc

SEQ ID NO: 15823 - DNA, 13 bp, Artificial Sequence
  synthetic sequence
tgcggcgtaacaa

SEQ ID NO: 15824 - DNA, 13 bp, Artificial Sequence
  synthetic sequence
atagccgcagata

SEQ ID NO: 15825 - DNA, 13 bp, Artificial Sequence
  synthetic sequence
aggaacagcggca

SEQ ID NO: 15826 - DNA, 13 bp, Artificial Sequence
  synthetic sequence
agcaaatactctt

SEQ ID NO: 15827 - DNA, 13 bp, Artificial Sequence
  synthetic sequence
aatcatacgaata

SEQ ID NO: 15828 - DNA, 13 bp, Artificial Sequence
  synthetic sequence
atccttacttctt

SEQ ID NO: 15829 - DNA, 13 bp, Artificial Sequence
  synthetic sequence
gccagcgcatcca

SEQ ID NO: 15830 - DNA, 13 bp, Artificial Sequence
  synthetic sequence
aacccggctctcg

SEQ ID NO: 15831 - DNA, 13 bp, Artificial Sequence
  synthetic sequence
cgcaggagtggtg

SEQ ID NO: 15832 - DNA, 13 bp, Artificial Sequence
  synthetic sequence
atgcgtgctaagg

SEQ ID NO: 15833 - DNA, 13 bp, Artificial Sequence
  synthetic sequence
gcctgttcccgca

SEQ ID NO: 15834 - DNA, 13 bp, Artificial Sequence
  synthetic sequence
gatttatggggaa

SEQ ID NO: 15835 - DNA, 13 bp, Artificial Sequence
  synthetic sequence
gatcgcgtagtcg

SEQ ID NO: 15836 - DNA, 13 bp, Artificial Sequence
  synthetic sequence
ataaagaatgaac

SEQ ID NO: 15837 - DNA, 13 bp, Artificial Sequence
  synthetic sequence
aatgcggattcag

SEQ ID NO: 15838 - DNA, 13 bp, Artificial Sequence
  synthetic sequence
cgcaaaacctgcg

SEQ ID NO: 15839 - DNA, 13 bp, Artificial Sequence
  synthetic sequence
atttcgccgttgg

SEQ ID NO: 15840 - DNA, 13 bp, Artificial Sequence
  synthetic sequence
gataagccgcttg

SEQ ID NO: 15841 - DNA, 13 bp, Artificial Sequence
  synthetic sequence
aatctggtgctgg

SEQ ID NO: 15842 - DNA, 13 bp, Artificial Sequence
  synthetic sequence
ttgccatctgctc

SEQ ID NO: 15843 - DNA, 13 bp, Artificial Sequence
  synthetic sequence
ctgctgatcaccg

SEQ ID NO: 15844 - DNA, 13 bp, Artificial Sequence
  synthetic sequence
cttctgactgagc

SEQ ID NO: 15845 - DNA, 13 bp, Artificial Sequence
  synthetic sequence
cagcaataaacca

SEQ ID NO: 15846 - DNA, 13 bp, Artificial Sequence
  synthetic sequence
gtaattctgagca

SEQ ID NO: 15847 - DNA, 13 bp, Artificial Sequence
  synthetic sequence
gttgagcctggtg

SEQ ID NO: 15848 - DNA, 13 bp, Artificial Sequence
  synthetic sequence
ggcaatgccagac

SEQ ID NO: 15849 - DNA, 13 bp, Artificial Sequence
  synthetic sequence
ctaataccggtgt

SEQ ID NO: 15850 - DNA, 13 bp, Artificial Sequence
  synthetic sequence
aattcagaggctg

SEQ ID NO: 15851 - DNA, 13 bp, Artificial Sequence
  synthetic sequence
gtagctgtccagt

SEQ ID NO: 15852 - DNA, 13 bp, Artificial Sequence
  synthetic sequence
atcgttctaatag

SEQ ID NO: 15853 - DNA, 13 bp, Artificial Sequence
  synthetic sequence
gcaattcgcgatg

SEQ ID NO: 15854 - DNA, 13 bp, Artificial Sequence
  synthetic sequence
gacagcttccaac

SEQ ID NO: 15855 - DNA, 13 bp, Artificial Sequence
  synthetic sequence
agaaacgtcaatt

SEQ ID NO: 15856 - DNA, 13 bp, Artificial Sequence
  synthetic sequence
ctcataacagtag

SEQ ID NO: 15857 - DNA, 13 bp, Artificial Sequence
  synthetic sequence
tctggctgaactg

SEQ ID NO: 15858 - DNA, 13 bp, Artificial Sequence
  synthetic sequence
acaaagatgttgc

SEQ ID NO: 15859 - DNA, 13 bp, Artificial Sequence
  synthetic sequence
aataatagagtcc

SEQ ID NO: 15860 - DNA, 13 bp, Artificial Sequence
  synthetic sequence
gcaaagctttctt

SEQ ID NO: 15861 - DNA, 13 bp, Artificial Sequence
  synthetic sequence
aaacgcttttcgg

SEQ ID NO: 15862 - DNA, 13 bp, Artificial Sequence
  synthetic sequence
tggtggcgcacag

SEQ ID NO: 15863 - DNA, 13 bp, Artificial Sequence
  synthetic sequence
gtcagaatcagtg

SEQ ID NO: 15864 - DNA, 13 bp, Artificial Sequence
  synthetic sequence
tcatctgccagga

SEQ ID NO: 15865 - DNA, 13 bp, Artificial Sequence
  synthetic sequence
tgaggggttaaca

SEQ ID NO: 15866 - DNA, 13 bp, Artificial Sequence
  synthetic sequence
cctgtcaggtaac

SEQ ID NO: 15867 - DNA, 13 bp, Artificial Sequence
  synthetic sequence
gaagcgcgtcagt

SEQ ID NO: 15868 - DNA, 13 bp, Artificial Sequence
  synthetic sequence
atcaatatcggga

SEQ ID NO: 15869 - DNA, 13 bp, Artificial Sequence
  synthetic sequence
cgcttttagaacg

SEQ ID NO: 15870 - DNA, 13 bp, Artificial Sequence
  synthetic sequence
cgggtcagtatcc

SEQ ID NO: 15871 - DNA, 13 bp, Artificial Sequence
  synthetic sequence
cagcacgaacagg

SEQ ID NO: 15872 - DNA, 13 bp, Artificial Sequence
  synthetic sequence
atatacgattctg

SEQ ID NO: 15873 - DNA, 13 bp, Artificial Sequence
  synthetic sequence
ttgattgccgcca

SEQ ID NO: 15874 - DNA, 13 bp, Artificial Sequence
  synthetic sequence
tgccgccctaact

SEQ ID NO: 15875 - DNA, 13 bp, Artificial Sequence
  synthetic sequence
gctatggcaatat

SEQ ID NO: 15876 - DNA, 13 bp, Artificial Sequence
  synthetic sequence
agctgcgccttcg

SEQ ID NO: 15877 - DNA, 13 bp, Artificial Sequence
  synthetic sequence
cacggactgctgc

SEQ ID NO: 15878 - DNA, 13 bp, Artificial Sequence
  synthetic sequence
gctgcatcttcta

SEQ ID NO: 15879 - DNA, 13 bp, Artificial Sequence
  synthetic sequence
ttggagcggcagc

SEQ ID NO: 15880 - DNA, 13 bp, Artificial Sequence
  synthetic sequence
ctcgggatatctt

SEQ ID NO: 15881 - DNA, 13 bp, Artificial Sequence
  synthetic sequence
ctggtcgggtact

SEQ ID NO: 15882 - DNA, 13 bp, Artificial Sequence
  synthetic sequence
tgccgcaactttc

SEQ ID NO: 15883 - DNA, 13 bp, Artificial Sequence
  synthetic sequence
catttggatagct

SEQ ID NO: 15884 - DNA, 13 bp, Artificial Sequence
  synthetic sequence
tccagcagcagca

SEQ ID NO: 15885 - DNA, 13 bp, Artificial Sequence
  synthetic sequence
tcattgggtcgaa

SEQ ID NO: 15886 - DNA, 13 bp, Artificial Sequence
  synthetic sequence
atgtaacagaaaa

SEQ ID NO: 15887 - DNA, 13 bp, Artificial Sequence
  synthetic sequence
atattttcttctc

SEQ ID NO: 15888 - DNA, 13 bp, Artificial Sequence
  synthetic sequence
attaaagagaaac

SEQ ID NO: 15889 - DNA, 13 bp, Artificial Sequence
  synthetic sequence
cgaaattgaatca

SEQ ID NO: 15890 - DNA, 13 bp, Artificial Sequence
  synthetic sequence
acgaatgtctcct

SEQ ID NO: 15891 - DNA, 13 bp, Artificial Sequence
  synthetic sequence
ttgtgcaggcttt

SEQ ID NO: 15892 - DNA, 13 bp, Artificial Sequence
  synthetic sequence
tcccacatcagat

SEQ ID NO: 15893 - DNA, 13 bp, Artificial Sequence
  synthetic sequence
tatctatccgact

SEQ ID NO: 15894 - DNA, 13 bp, Artificial Sequence
  synthetic sequence
aacaacaataccc

SEQ ID NO: 15895 - DNA, 13 bp, Artificial Sequence
  synthetic sequence
gcccaggacaaga

SEQ ID NO: 15896 - DNA, 13 bp, Artificial Sequence
  synthetic sequence
tcgcaattggaga

SEQ ID NO: 15897 - DNA, 13 bp, Artificial Sequence
  synthetic sequence
agctttaccatta

SEQ ID NO: 15898 - DNA, 13 bp, Artificial Sequence
  synthetic sequence
aggaatggctgta

SEQ ID NO: 15899 - DNA, 13 bp, Artificial Sequence
  synthetic sequence
gccctgggtcatg

SEQ ID NO: 15900 - DNA, 13 bp, Artificial Sequence
  synthetic sequence
gaaggtctctcgc

SEQ ID NO: 15901 - DNA, 13 bp, Artificial Sequence
  synthetic sequence
gaccttgttcggg

SEQ ID NO: 15902 - DNA, 13 bp, Artificial Sequence
  synthetic sequence
aggtctttatcgt

SEQ ID NO: 15903 - DNA, 13 bp, Artificial Sequence
  synthetic sequence
cttaccgttatca

SEQ ID NO: 15904 - DNA, 13 bp, Artificial Sequence
  synthetic sequence
cattttggtaaag

SEQ ID NO: 15905 - DNA, 13 bp, Artificial Sequence
  synthetic sequence
aggtatcggggta

SEQ ID NO: 15906 - DNA, 13 bp, Artificial Sequence
  synthetic sequence
tgattgtttcatt

SEQ ID NO: 15907 - DNA, 13 bp, Artificial Sequence
  synthetic sequence
tggtcaccagcgt

SEQ ID NO: 15908 - DNA, 13 bp, Artificial Sequence
  synthetic sequence
gcatctccgcagg

SEQ ID NO: 15909 - DNA, 13 bp, Artificial Sequence
  synthetic sequence
acacccagtaggc

SEQ ID NO: 15910 - DNA, 13 bp, Artificial Sequence
  synthetic sequence
cttaggcattctg

SEQ ID NO: 15911 - DNA, 13 bp, Artificial Sequence
  synthetic sequence
ggcacattattat

SEQ ID NO: 15912 - DNA, 13 bp, Artificial Sequence
  synthetic sequence
ttttgatatgagt

SEQ ID NO: 15913 - DNA, 13 bp, Artificial Sequence
  synthetic sequence
ctgataactgtcc

SEQ ID NO: 15914 - DNA, 13 bp, Artificial Sequence
  synthetic sequence
ggtctccattggc

SEQ ID NO: 15915 - DNA, 13 bp, Artificial Sequence
  synthetic sequence
ccaacgcgccaca

SEQ ID NO: 15916 - DNA, 13 bp, Artificial Sequence
  synthetic sequence
ttgtactttccct

SEQ ID NO: 15917 - DNA, 13 bp, Artificial Sequence
  synthetic sequence
cttctttagtatc

SEQ ID NO: 15918 - DNA, 13 bp, Artificial Sequence
  synthetic sequence
atccaaataatcc

SEQ ID NO: 15919 - DNA, 13 bp, Artificial Sequence
  synthetic sequence
gggaacagccgta

SEQ ID NO: 15920 - DNA, 13 bp, Artificial Sequence
  synthetic sequence
tcggtcagcaaaa

SEQ ID NO: 15921 - DNA, 13 bp, Artificial Sequence
  synthetic sequence
tgcagctcggcga

SEQ ID NO: 15922 - DNA, 13 bp, Artificial Sequence
  synthetic sequence
cgcaaatcaaaga

SEQ ID NO: 15923 - DNA, 13 bp, Artificial Sequence
  synthetic sequence
tctggttgatgaa

SEQ ID NO: 15924 - DNA, 13 bp, Artificial Sequence
  synthetic sequence
ggtgtggactctg

SEQ ID NO: 15925 - DNA, 13 bp, Artificial Sequence
  synthetic sequence
ccgcaggctgttc

SEQ ID NO: 15926 - DNA, 13 bp, Artificial Sequence
  synthetic sequence
aacccgtcctgat

SEQ ID NO: 15927 - DNA, 13 bp, Artificial Sequence
  synthetic sequence
cccaatcaggctt

SEQ ID NO: 15928 - DNA, 13 bp, Artificial Sequence
  synthetic sequence
agaaaccgcttca

SEQ ID NO: 15929 - DNA, 13 bp, Artificial Sequence
  synthetic sequence
acgctactgatgg

SEQ ID NO: 15930 - DNA, 13 bp, Artificial Sequence
  synthetic sequence
atgtcattgcgct

SEQ ID NO: 15931 - DNA, 13 bp, Artificial Sequence
  synthetic sequence
tcgacgaactccc

SEQ ID NO: 15932 - DNA, 13 bp, Artificial Sequence
  synthetic sequence
ccagcaactggtc

SEQ ID NO: 15933 - DNA, 13 bp, Artificial Sequence
  synthetic sequence
gttgagaatctgc

SEQ ID NO: 15934 - DNA, 13 bp, Artificial Sequence
  synthetic sequence
cgtttacaaaacg

SEQ ID NO: 15935 - DNA, 13 bp, Artificial Sequence
  synthetic sequence
tcatgtgatttcg

SEQ ID NO: 15936 - DNA, 13 bp, Artificial Sequence
  synthetic sequence
ctgtcggtggcga

SEQ ID NO: 15937 - DNA, 13 bp, Artificial Sequence
  synthetic sequence
aacaccatgccaa

SEQ ID NO: 15938 - DNA, 13 bp, Artificial Sequence
  synthetic sequence
ctatcagcttatc

SEQ ID NO: 15939 - DNA, 13 bp, Artificial Sequence
  synthetic sequence
ctttgcggaaatg

SEQ ID NO: 15940 - DNA, 13 bp, Artificial Sequence
  synthetic sequence
ttcgccctgacca

SEQ ID NO: 15941 - DNA, 13 bp, Artificial Sequence
  synthetic sequence
cttgtttcatttt

SEQ ID NO: 15942 - DNA, 13 bp, Artificial Sequence
  synthetic sequence
taaaggcaatcac

SEQ ID NO: 15943 - DNA, 13 bp, Artificial Sequence
  synthetic sequence
cgtgcggatgttt

SEQ ID NO: 15944 - DNA, 13 bp, Artificial Sequence
  synthetic sequence
cagttgaataatg

SEQ ID NO: 15945 - DNA, 13 bp, Artificial Sequence
  synthetic sequence
cttttgatagaga

SEQ ID NO: 15946 - DNA, 13 bp, Artificial Sequence
  synthetic sequence
tattagacgagca

SEQ ID NO: 15947 - DNA, 13 bp, Artificial Sequence
  synthetic sequence
gaacacgaccgtg

SEQ ID NO: 15948 - DNA, 13 bp, Artificial Sequence
  synthetic sequence
cagtcgccctaaa

SEQ ID NO: 15949 - DNA, 13 bp, Artificial Sequence
  synthetic sequence
gattttcgtaatg

SEQ ID NO: 15950 - DNA, 13 bp, Artificial Sequence
  synthetic sequence
tcgagttctgctt

SEQ ID NO: 15951 - DNA, 13 bp, Artificial Sequence
  synthetic sequence
tgctcctgttgcc

SEQ ID NO: 15952 - DNA, 13 bp, Artificial Sequence
  synthetic sequence
actaagaacagcg

SEQ ID NO: 15953 - DNA, 13 bp, Artificial Sequence
  synthetic sequence
aaaagcccgttcc

SEQ ID NO: 15954 - DNA, 13 bp, Artificial Sequence
  synthetic sequence
aatgtatagacaa

SEQ ID NO: 15955 - DNA, 13 bp, Artificial Sequence
  synthetic sequence
atgccgacgccga

SEQ ID NO: 15956 - DNA, 13 bp, Artificial Sequence
  synthetic sequence
ttcttcataatca

SEQ ID NO: 15957 - DNA, 13 bp, Artificial Sequence
  synthetic sequence
aacgcgtacgttt

SEQ ID NO: 15958 - DNA, 13 bp, Artificial Sequence
  synthetic sequence
gtggtgccctgct

SEQ ID NO: 15959 - DNA, 13 bp, Artificial Sequence
  synthetic sequence
gcctgatcgccga

SEQ ID NO: 15960 - DNA, 13 bp, Artificial Sequence
  synthetic sequence
gccagtttgatac

SEQ ID NO: 15961 - DNA, 13 bp, Artificial Sequence
  synthetic sequence
atgattcctccaa

SEQ ID NO: 15962 - DNA, 13 bp, Artificial Sequence
  synthetic sequence
ctttcatacctaa

SEQ ID NO: 15963 - DNA, 13 bp, Artificial Sequence
  synthetic sequence
tttattaccgttc

SEQ ID NO: 15964 - DNA, 13 bp, Artificial Sequence
  synthetic sequence
caatctcgattac

SEQ ID NO: 15965 - DNA, 13 bp, Artificial Sequence
  synthetic sequence
ggagcagatggtt

SEQ ID NO: 15966 - DNA, 13 bp, Artificial Sequence
  synthetic sequence
aatattctcggct

SEQ ID NO: 15967 - DNA, 13 bp, Artificial Sequence
  synthetic sequence
gtttgctccggta

SEQ ID NO: 15968 - DNA, 13 bp, Artificial Sequence
  synthetic sequence
atatgtcgaaatg

SEQ ID NO: 15969 - DNA, 13 bp, Artificial Sequence
  synthetic sequence
gagcttacattta

SEQ ID NO: 15970 - DNA, 13 bp, Artificial Sequence
  synthetic sequence
tggtgggtatcgc

SEQ ID NO: 15971 - DNA, 13 bp, Artificial Sequence
  synthetic sequence
gtgatcgcgttcg

SEQ ID NO: 15972 - DNA, 13 bp, Artificial Sequence
  synthetic sequence
ggggtgtgatgat

SEQ ID NO: 15973 - DNA, 13 bp, Artificial Sequence
  synthetic sequence
cctgatgtatcga

SEQ ID NO: 15974 - DNA, 13 bp, Artificial Sequence
  synthetic sequence
caagggcagtgcg

SEQ ID NO: 15975 - DNA, 13 bp, Artificial Sequence
  synthetic sequence
tatcgggtggatt

SEQ ID NO: 15976 - DNA, 13 bp, Artificial Sequence
  synthetic sequence
ttgatccccagac

SEQ ID NO: 15977 - DNA, 13 bp, Artificial Sequence
  synthetic sequence
tcggccaggtgca

SEQ ID NO: 15978 - DNA, 13 bp, Artificial Sequence
  synthetic sequence
gtgaagccgtctg

SEQ ID NO: 15979 - DNA, 13 bp, Artificial Sequence
  synthetic sequence
aggtgacgccgaa

SEQ ID NO: 15980 - DNA, 13 bp, Artificial Sequence
  synthetic sequence
atttcaaccgtga

SEQ ID NO: 15981 - DNA, 13 bp, Artificial Sequence
  synthetic sequence
agcgtcaaagggg

SEQ ID NO: 15982 - DNA, 13 bp, Artificial Sequence
  synthetic sequence
aatgccaatgcgc

SEQ ID NO: 15983 - DNA, 13 bp, Artificial Sequence
  synthetic sequence
cacgcaagacctc

SEQ ID NO: 15984 - DNA, 13 bp, Artificial Sequence
  synthetic sequence
catagacggagtg

SEQ ID NO: 15985 - DNA, 13 bp, Artificial Sequence
  synthetic sequence
cggtcacttcatt

SEQ ID NO: 15986 - DNA, 13 bp, Artificial Sequence
  synthetic sequence
tctactggaatta

SEQ ID NO: 15987 - DNA, 13 bp, Artificial Sequence
  synthetic sequence
acgaggaaggcca

SEQ ID NO: 15988 - DNA, 13 bp, Artificial Sequence
  synthetic sequence
aggatcttttcgg

SEQ ID NO: 15989 - DNA, 13 bp, Artificial Sequence
  synthetic sequence
acgcgcatcgagt

SEQ ID NO: 15990 - DNA, 13 bp, Artificial Sequence
  synthetic sequence
aatcgctgggctt

SEQ ID NO: 15991 - DNA, 13 bp, Artificial Sequence
  synthetic sequence
aggacgcctacat

SEQ ID NO: 15992 - DNA, 13 bp, Artificial Sequence
  synthetic sequence
cggtggttcgctg

SEQ ID NO: 15993 - DNA, 13 bp, Artificial Sequence
  synthetic sequence
cgtaaaaccggct

SEQ ID NO: 15994 - DNA, 13 bp, Artificial Sequence
  synthetic sequence
cagcgtgagcgag

SEQ ID NO: 15995 - DNA, 13 bp, Artificial Sequence
  synthetic sequence
ggaaacgaaacct

SEQ ID NO: 15996 - DNA, 13 bp, Artificial Sequence
  synthetic sequence
ccgtgatcttcca

SEQ ID NO: 15997 - DNA, 13 bp, Artificial Sequence
  synthetic sequence
ctgtctgttacac

SEQ ID NO: 15998 - DNA, 13 bp, Artificial Sequence
  synthetic sequence
acagcccagagct

SEQ ID NO: 15999 - DNA, 13 bp, Artificial Sequence
  synthetic sequence
acatatcccaagg

SEQ ID NO: 16000 - DNA, 13 bp, Artificial Sequence
  synthetic sequence
cggattcacttca

SEQ ID NO: 16001 - DNA, 13 bp, Artificial Sequence
  synthetic sequence
atccgggcgcaga

SEQ ID NO: 16002 - DNA, 13 bp, Artificial Sequence
  synthetic sequence
agccgccttgacc

SEQ ID NO: 16003 - DNA, 13 bp, Artificial Sequence
  synthetic sequence
ctgcaccaacaac

SEQ ID NO: 16004 - DNA, 13 bp, Artificial Sequence
  synthetic sequence
tttccgcaggtag

SEQ ID NO: 16005 - DNA, 13 bp, Artificial Sequence
  synthetic sequence
ctgatcgtcctgc

SEQ ID NO: 16006 - DNA, 13 bp, Artificial Sequence
  synthetic sequence
ttcctaatgccaa

SEQ ID NO: 16007 - DNA, 13 bp, Artificial Sequence
  synthetic sequence
ccacaaagcgata

SEQ ID NO: 16008 - DNA, 13 bp, Artificial Sequence
  synthetic sequence
agggcgagatcaa

SEQ ID NO: 16009 - DNA, 13 bp, Artificial Sequence
  synthetic sequence
tgtaataatgtcg

SEQ ID NO: 16010 - DNA, 13 bp, Artificial Sequence
  synthetic sequence
gtcaacaatggta

SEQ ID NO: 16011 - DNA, 13 bp, Artificial Sequence
  synthetic sequence
cttcacgaagtag

SEQ ID NO: 16012 - DNA, 13 bp, Artificial Sequence
  synthetic sequence
aaacttcggcttc

SEQ ID NO: 16013 - DNA, 13 bp, Artificial Sequence
  synthetic sequence
ggctgccagtttt

SEQ ID NO: 16014 - DNA, 13 bp, Artificial Sequence
  synthetic sequence
tatgttatcacac

SEQ ID NO: 16015 - DNA, 13 bp, Artificial Sequence
  synthetic sequence
tggaggacgatgt

SEQ ID NO: 16016 - DNA, 13 bp, Artificial Sequence
  synthetic sequence
tcgaggacatgct

SEQ ID NO: 16017 - DNA, 13 bp, Artificial Sequence
  synthetic sequence
aaaagttcaattg

SEQ ID NO: 16018 - DNA, 13 bp, Artificial Sequence
  synthetic sequence
ggttgtctgcttt

SEQ ID NO: 16019 - DNA, 13 bp, Artificial Sequence
  synthetic sequence
caatttgccagca

SEQ ID NO: 16020 - DNA, 13 bp, Artificial Sequence
  synthetic sequence
cctatgtcctgac

SEQ ID NO: 16021 - DNA, 13 bp, Artificial Sequence
  synthetic sequence
ttcccttagatca

SEQ ID NO: 16022 - DNA, 13 bp, Artificial Sequence
  synthetic sequence
ttttcccggagtt

SEQ ID NO: 16023 - DNA, 13 bp, Artificial Sequence
  synthetic sequence
cgcgcacgaacat

SEQ ID NO: 16024 - DNA, 13 bp, Artificial Sequence
  synthetic sequence
gggcaaacggctg

SEQ ID NO: 16025 - DNA, 13 bp, Artificial Sequence
  synthetic sequence
aagcatcgagtct

SEQ ID NO: 16026 - DNA, 13 bp, Artificial Sequence
  synthetic sequence
tacttattgtgga

SEQ ID NO: 16027 - DNA, 13 bp, Artificial Sequence
  synthetic sequence
tatagccgacccc

SEQ ID NO: 16028 - DNA, 13 bp, Artificial Sequence
  synthetic sequence
gatcgaatagccg

SEQ ID NO: 16029 - DNA, 13 bp, Artificial Sequence
  synthetic sequence
gtaactattgaaa

SEQ ID NO: 16030 - DNA, 13 bp, Artificial Sequence
  synthetic sequence
cgacgcgaatggt

SEQ ID NO: 16031 - DNA, 13 bp, Artificial Sequence
  synthetic sequence
agcgagaagccga

SEQ ID NO: 16032 - DNA, 13 bp, Artificial Sequence
  synthetic sequence
tgtcgaaggccag

SEQ ID NO: 16033 - DNA, 13 bp, Artificial Sequence
  synthetic sequence
tgtcgttctgtcc

SEQ ID NO: 16034 - DNA, 13 bp, Artificial Sequence
  synthetic sequence
gttcgggataagc

SEQ ID NO: 16035 - DNA, 13 bp, Artificial Sequence
  synthetic sequence
tcattgggcaaac

SEQ ID NO: 16036 - DNA, 13 bp, Artificial Sequence
  synthetic sequence
caactgttgaacc

SEQ ID NO: 16037 - DNA, 13 bp, Artificial Sequence
  synthetic sequence
tcaattcaaattg

SEQ ID NO: 16038 - DNA, 13 bp, Artificial Sequence
  synthetic sequence
actaagttggcat

SEQ ID NO: 16039 - DNA, 13 bp, Artificial Sequence
  synthetic sequence
ggttacgcgcttc

SEQ ID NO: 16040 - DNA, 13 bp, Artificial Sequence
  synthetic sequence
cacgcgtttcagt

SEQ ID NO: 16041 - DNA, 13 bp, Artificial Sequence
  synthetic sequence
gtctgccaagctc

SEQ ID NO: 16042 - DNA, 13 bp, Artificial Sequence
  synthetic sequence
aatgtatgtgcga

SEQ ID NO: 16043 - DNA, 13 bp, Artificial Sequence
  synthetic sequence
ttatcatcgataa

SEQ ID NO: 16044 - DNA, 13 bp, Artificial Sequence
  synthetic sequence
ctcagcctgtttg

SEQ ID NO: 16045 - DNA, 13 bp, Artificial Sequence
  synthetic sequence
cagcggcattgca

SEQ ID NO: 16046 - DNA, 13 bp, Artificial Sequence
  synthetic sequence
aggatgtccgggc

SEQ ID NO: 16047 - DNA, 13 bp, Artificial Sequence
  synthetic sequence
gtatggtgatggg

SEQ ID NO: 16048 - DNA, 13 bp, Artificial Sequence
  synthetic sequence
ggagttcagctcc

SEQ ID NO: 16049 - DNA, 13 bp, Artificial Sequence
  synthetic sequence
tcagtacggtatg

SEQ ID NO: 16050 - DNA, 13 bp, Artificial Sequence
  synthetic sequence
gttgccagtttaa

SEQ ID NO: 16051 - DNA, 13 bp, Artificial Sequence
  synthetic sequence
ccagctttcgtac

SEQ ID NO: 16052 - DNA, 13 bp, Artificial Sequence
  synthetic sequence
ctcgatccactcg

SEQ ID NO: 16053 - DNA, 13 bp, Artificial Sequence
  synthetic sequence
ccctcctggatat

SEQ ID NO: 16054 - DNA, 13 bp, Artificial Sequence
  synthetic sequence
tccgtcgcaaggc

SEQ ID NO: 16055 - DNA, 13 bp, Artificial Sequence
  synthetic sequence
tactttcaccagc

SEQ ID NO: 16056 - DNA, 13 bp, Artificial Sequence
  synthetic sequence
cgtacgccgctac

SEQ ID NO: 16057 - DNA, 13 bp, Artificial Sequence
  synthetic sequence
ggtaacgaaacca

SEQ ID NO: 16058 - DNA, 13 bp, Artificial Sequence
  synthetic sequence
ccattcatttaca

SEQ ID NO: 16059 - DNA, 13 bp, Artificial Sequence
  synthetic sequence
ctgaaccttcaaa

SEQ ID NO: 16060 - DNA, 13 bp, Artificial Sequence
  synthetic sequence
tcttggctaaata

SEQ ID NO: 16061 - DNA, 13 bp, Artificial Sequence
  synthetic sequence
atgactgccaata

SEQ ID NO: 16062 - DNA, 13 bp, Artificial Sequence
  synthetic sequence
tcatcgcccgctt

SEQ ID NO: 16063 - DNA, 13 bp, Artificial Sequence
  synthetic sequence
ttcggggacgctg

SEQ ID NO: 16064 - DNA, 13 bp, Artificial Sequence
  synthetic sequence
tgccgcaggtcga

SEQ ID NO: 16065 - DNA, 13 bp, Artificial Sequence
  synthetic sequence
catggtcgtaatt

SEQ ID NO: 16066 - DNA, 13 bp, Artificial Sequence
  synthetic sequence
tgctgttcctgcg

SEQ ID NO: 16067 - DNA, 13 bp, Artificial Sequence
  synthetic sequence
cccgccgtaatgt

SEQ ID NO: 16068 - DNA, 13 bp, Artificial Sequence
  synthetic sequence
tcatacatttctt

SEQ ID NO: 16069 - DNA, 13 bp, Artificial Sequence
  synthetic sequence
atgaggggaaaac

SEQ ID NO: 16070 - DNA, 13 bp, Artificial Sequence
  synthetic sequence
ggtgcgatccaca

SEQ ID NO: 16071 - DNA, 13 bp, Artificial Sequence
  synthetic sequence
cgggctgatactg

SEQ ID NO: 16072 - DNA, 13 bp, Artificial Sequence
  synthetic sequence
acgcacggcagga

SEQ ID NO: 16073 - DNA, 13 bp, Artificial Sequence
  synthetic sequence
gttgaagatggct

SEQ ID NO: 16074 - DNA, 13 bp, Artificial Sequence
  synthetic sequence
ccggccgatcttt

SEQ ID NO: 16075 - DNA, 13 bp, Artificial Sequence
  synthetic sequence
accattttcgata

SEQ ID NO: 16076 - DNA, 13 bp, Artificial Sequence
  synthetic sequence
gagcaggatgagg

SEQ ID NO: 16077 - DNA, 13 bp, Artificial Sequence
  synthetic sequence
aagcccttcaatg

SEQ ID NO: 16078 - DNA, 13 bp, Artificial Sequence
  synthetic sequence
tattattgctgtc

SEQ ID NO: 16079 - DNA, 13 bp, Artificial Sequence
  synthetic sequence
ctgcggatcgcga

SEQ ID NO: 16080 - DNA, 13 bp, Artificial Sequence
  synthetic sequence
gaattgcccagct

SEQ ID NO: 16081 - DNA, 13 bp, Artificial Sequence
  synthetic sequence
tcgttcgaggagc

SEQ ID NO: 16082 - DNA, 13 bp, Artificial Sequence
  synthetic sequence
gcattccttatgt

SEQ ID NO: 16083 - DNA, 13 bp, Artificial Sequence
  synthetic sequence
ttgaaataacagc

SEQ ID NO: 16084 - DNA, 13 bp, Artificial Sequence
  synthetic sequence
actaacggcatta

SEQ ID NO: 16085 - DNA, 13 bp, Artificial Sequence
  synthetic sequence
ttgatgatcaggg

SEQ ID NO: 16086 - DNA, 13 bp, Artificial Sequence
  synthetic sequence
caaagttgaagcg

SEQ ID NO: 16087 - DNA, 13 bp, Artificial Sequence
  synthetic sequence
catgccggacggt

SEQ ID NO: 16088 - DNA, 13 bp, Artificial Sequence
  synthetic sequence
caccagcttctgc

SEQ ID NO: 16089 - DNA, 13 bp, Artificial Sequence
  synthetic sequence
agggcaccagtat

SEQ ID NO: 16090 - DNA, 13 bp, Artificial Sequence
  synthetic sequence
tccttctgcgcga

SEQ ID NO: 16091 - DNA, 13 bp, Artificial Sequence
  synthetic sequence
ctcctttcaaagt

SEQ ID NO: 16092 - DNA, 13 bp, Artificial Sequence
  synthetic sequence
ggtaagccgcttc

SEQ ID NO: 16093 - DNA, 13 bp, Artificial Sequence
  synthetic sequence
gcggataacgggg

SEQ ID NO: 16094 - DNA, 13 bp, Artificial Sequence
  synthetic sequence
tattagccggtat

SEQ ID NO: 16095 - DNA, 13 bp, Artificial Sequence
  synthetic sequence
tccatcgcctggg

SEQ ID NO: 16096 - DNA, 13 bp, Artificial Sequence
  synthetic sequence
gtctgatatcaac

SEQ ID NO: 16097 - DNA, 13 bp, Artificial Sequence
  synthetic sequence
atcatcggtatca

SEQ ID NO: 16098 - DNA, 13 bp, Artificial Sequence
  synthetic sequence
aaagatcccatca

SEQ ID NO: 16099 - DNA, 13 bp, Artificial Sequence
  synthetic sequence
gttttagaaccgc

SEQ ID NO: 16100 - DNA, 13 bp, Artificial Sequence
  synthetic sequence
ggatggctgtgtt

SEQ ID NO: 16101 - DNA, 13 bp, Artificial Sequence
  synthetic sequence
taacaattcattg

SEQ ID NO: 16102 - DNA, 13 bp, Artificial Sequence
  synthetic sequence
ggtaacggcgcca

SEQ ID NO: 16103 - DNA, 13 bp, Artificial Sequence
  synthetic sequence
aatcggtttcagc

SEQ ID NO: 16104 - DNA, 13 bp, Artificial Sequence
  synthetic sequence
atcaaggatgagc

SEQ ID NO: 16105 - DNA, 13 bp, Artificial Sequence
  synthetic sequence
caccatctggccg

SEQ ID NO: 16106 - DNA, 13 bp, Artificial Sequence
  synthetic sequence
agcggctaaaatt

SEQ ID NO: 16107 - DNA, 13 bp, Artificial Sequence
  synthetic sequence
cgccagagcgaca

SEQ ID NO: 16108 - DNA, 13 bp, Artificial Sequence
  synthetic sequence
agaacttccgcgc

SEQ ID NO: 16109 - DNA, 13 bp, Artificial Sequence
  synthetic sequence
cgtcgacgatcac

SEQ ID NO: 16110 - DNA, 13 bp, Artificial Sequence
  synthetic sequence
gaaaacgcatccg

SEQ ID NO: 16111 - DNA, 13 bp, Artificial Sequence
  synthetic sequence
caacatcttcatt

SEQ ID NO: 16112 - DNA, 13 bp, Artificial Sequence
  synthetic sequence
accgggtcgatcc

SEQ ID NO: 16113 - DNA, 13 bp, Artificial Sequence
  synthetic sequence
tgtcggcggtatt

SEQ ID NO: 16114 - DNA, 13 bp, Artificial Sequence
  synthetic sequence
gttatcactcatg

SEQ ID NO: 16115 - DNA, 13 bp, Artificial Sequence
  synthetic sequence
taagtggaacgaa

SEQ ID NO: 16116 - DNA, 13 bp, Artificial Sequence
  synthetic sequence
cgatccccaacag

SEQ ID NO: 16117 - DNA, 13 bp, Artificial Sequence
  synthetic sequence
aagacccaataca

SEQ ID NO: 16118 - DNA, 13 bp, Artificial Sequence
  synthetic sequence
ataacagcactta

SEQ ID NO: 16119 - DNA, 13 bp, Artificial Sequence
  synthetic sequence
ctgctgaaagtga

SEQ ID NO: 16120 - DNA, 13 bp, Artificial Sequence
  synthetic sequence
gctgagaaaatat

SEQ ID NO: 16121 - DNA, 13 bp, Artificial Sequence
  synthetic sequence
tgctgtcgtcata

SEQ ID NO: 16122 - DNA, 13 bp, Artificial Sequence
  synthetic sequence
gggccggtgatca

SEQ ID NO: 16123 - DNA, 13 bp, Artificial Sequence
  synthetic sequence
gtctcctcgacgg

SEQ ID NO: 16124 - DNA, 13 bp, Artificial Sequence
  synthetic sequence
aaacgctgtcggt

SEQ ID NO: 16125 - DNA, 13 bp, Artificial Sequence
  synthetic sequence
tggaacttattaa

SEQ ID NO: 16126 - DNA, 13 bp, Artificial Sequence
  synthetic sequence
tgtcctaccagga

SEQ ID NO: 16127 - DNA, 13 bp, Artificial Sequence
  synthetic sequence
ctggttgcgcacg

SEQ ID NO: 16128 - DNA, 13 bp, Artificial Sequence
  synthetic sequence
ttttgttattcca

SEQ ID NO: 16129 - DNA, 13 bp, Artificial Sequence
  synthetic sequence
gcctgctcaaagc

SEQ ID NO: 16130 - DNA, 13 bp, Artificial Sequence
  synthetic sequence
acgcaggaggata

SEQ ID NO: 16131 - DNA, 13 bp, Artificial Sequence
  synthetic sequence
gacggaacggatt

SEQ ID NO: 16132 - DNA, 13 bp, Artificial Sequence
  synthetic sequence
tcagcggccgcat

SEQ ID NO: 16133 - DNA, 13 bp, Artificial Sequence
  synthetic sequence
accaccacaatcg

SEQ ID NO: 16134 - DNA, 13 bp, Artificial Sequence
  synthetic sequence
gataacgcggtag

SEQ ID NO: 16135 - DNA, 13 bp, Artificial Sequence
  synthetic sequence
gtcagcaagacct

SEQ ID NO: 16136 - DNA, 13 bp, Artificial Sequence
  synthetic sequence
tgaaagtgtcgat

SEQ ID NO: 16137 - DNA, 13 bp, Artificial Sequence
  synthetic sequence
aggagaactcaga

SEQ ID NO: 16138 - DNA, 13 bp, Artificial Sequence
  synthetic sequence
acgaccacaaaga

SEQ ID NO: 16139 - DNA, 13 bp, Artificial Sequence
  synthetic sequence
gcaccagacgcac

SEQ ID NO: 16140 - DNA, 13 bp, Artificial Sequence
  synthetic sequence
caccggcacatgg

SEQ ID NO: 16141 - DNA, 13 bp, Artificial Sequence
  synthetic sequence
aaaatcctgttga

SEQ ID NO: 16142 - DNA, 13 bp, Artificial Sequence
  synthetic sequence
cgagctgatcgag

SEQ ID NO: 16143 - DNA, 13 bp, Artificial Sequence
  synthetic sequence
tcgaggttgaccc

SEQ ID NO: 16144 - DNA, 13 bp, Artificial Sequence
  synthetic sequence
cggcagcacaaac

SEQ ID NO: 16145 - DNA, 13 bp, Artificial Sequence
  synthetic sequence
agtttatggaaaa

SEQ ID NO: 16146 - DNA, 13 bp, Artificial Sequence
  synthetic sequence
tgtaccaaatgcg

SEQ ID NO: 16147 - DNA, 13 bp, Artificial Sequence
  synthetic sequence
tgcgaattcaccg

SEQ ID NO: 16148 - DNA, 13 bp, Artificial Sequence
  synthetic sequence
cgaacatccccgg

SEQ ID NO: 16149 - DNA, 13 bp, Artificial Sequence
  synthetic sequence
gatccgatctacg

SEQ ID NO: 16150 - DNA, 13 bp, Artificial Sequence
  synthetic sequence
acggtatcgtact

SEQ ID NO: 16151 - DNA, 13 bp, Artificial Sequence
  synthetic sequence
caatcaagcggtc

SEQ ID NO: 16152 - DNA, 13 bp, Artificial Sequence
  synthetic sequence
gcaccgagcggaa

SEQ ID NO: 16153 - DNA, 13 bp, Artificial Sequence
  synthetic sequence
gacccgatctacg

SEQ ID NO: 16154 - DNA, 13 bp, Artificial Sequence
  synthetic sequence
gcaggaaggtttt

SEQ ID NO: 16155 - DNA, 13 bp, Artificial Sequence
  synthetic sequence
tgccacctgaaac

SEQ ID NO: 16156 - DNA, 13 bp, Artificial Sequence
  synthetic sequence
aacatcaaggacc

SEQ ID NO: 16157 - DNA, 13 bp, Artificial Sequence
  synthetic sequence
ttgggtttgggca

SEQ ID NO: 16158 - DNA, 13 bp, Artificial Sequence
  synthetic sequence
tcatcgaccggcc

SEQ ID NO: 16159 - DNA, 13 bp, Artificial Sequence
  synthetic sequence
catgtatcatggt

SEQ ID NO: 16160 - DNA, 13 bp, Artificial Sequence
  synthetic sequence
accgcttcggcat

SEQ ID NO: 16161 - DNA, 13 bp, Artificial Sequence
  synthetic sequence
actatttgcaaca

SEQ ID NO: 16162 - DNA, 13 bp, Artificial Sequence
  synthetic sequence
ctttgcgcggcaa

SEQ ID NO: 16163 - DNA, 13 bp, Artificial Sequence
  synthetic sequence
taggtacttgaat

SEQ ID NO: 16164 - DNA, 13 bp, Artificial Sequence
  synthetic sequence
gcaggatgtagcc

SEQ ID NO: 16165 - DNA, 13 bp, Artificial Sequence
  synthetic sequence
cattcctgccaga

SEQ ID NO: 16166 - DNA, 13 bp, Artificial Sequence
  synthetic sequence
atgctcaatatct

SEQ ID NO: 16167 - DNA, 13 bp, Artificial Sequence
  synthetic sequence
gaacaggggagcg

SEQ ID NO: 16168 - DNA, 13 bp, Artificial Sequence
  synthetic sequence
acttggttgagta

SEQ ID NO: 16169 - DNA, 13 bp, Artificial Sequence
  synthetic sequence
tcttgcggctaaa

SEQ ID NO: 16170 - DNA, 13 bp, Artificial Sequence
  synthetic sequence
acggaaaccatca

SEQ ID NO: 16171 - DNA, 13 bp, Artificial Sequence
  synthetic sequence
gtttccacccgta

SEQ ID NO: 16172 - DNA, 13 bp, Artificial Sequence
  synthetic sequence
tggcgtcgaggac

SEQ ID NO: 16173 - DNA, 13 bp, Artificial Sequence
  synthetic sequence
cgctgaacgagca

SEQ ID NO: 16174 - DNA, 13 bp, Artificial Sequence
  synthetic sequence
tggtcgtgctggt

SEQ ID NO: 16175 - DNA, 13 bp, Artificial Sequence
  synthetic sequence
gcgcaacgttgtt

SEQ ID NO: 16176 - DNA, 13 bp, Artificial Sequence
  synthetic sequence
tggtgccataatc

SEQ ID NO: 16177 - DNA, 13 bp, Artificial Sequence
  synthetic sequence
agatcccgtacga

SEQ ID NO: 16178 - DNA, 13 bp, Artificial Sequence
  synthetic sequence
accgcttcggtac

SEQ ID NO: 16179 - DNA, 13 bp, Artificial Sequence
  synthetic sequence
ggtgaagggccag

SEQ ID NO: 16180 - DNA, 13 bp, Artificial Sequence
  synthetic sequence
cgccttcgtcctg

SEQ ID NO: 16181 - DNA, 13 bp, Artificial Sequence
  synthetic sequence
actgccaattgca

SEQ ID NO: 16182 - DNA, 13 bp, Artificial Sequence
  synthetic sequence
gttgatcaggaag

SEQ ID NO: 16183 - DNA, 13 bp, Artificial Sequence
  synthetic sequence
tggtgaacatctt

SEQ ID NO: 16184 - DNA, 13 bp, Artificial Sequence
  synthetic sequence
tcgctacatttac

SEQ ID NO: 16185 - DNA, 13 bp, Artificial Sequence
  synthetic sequence
aatattgaccact

SEQ ID NO: 16186 - DNA, 13 bp, Artificial Sequence
  synthetic sequence
gtggttgctacac

SEQ ID NO: 16187 - DNA, 13 bp, Artificial Sequence
  synthetic sequence
cgttgcgcacgaa

SEQ ID NO: 16188 - DNA, 13 bp, Artificial Sequence
  synthetic sequence
gtgcaagtccata

SEQ ID NO: 16189 - DNA, 13 bp, Artificial Sequence
  synthetic sequence
attccagaatctc

SEQ ID NO: 16190 - DNA, 13 bp, Artificial Sequence
  synthetic sequence
agcaaccaaatgc

SEQ ID NO: 16191 - DNA, 13 bp, Artificial Sequence
  synthetic sequence
tgaatagcgcact

SEQ ID NO: 16192 - DNA, 13 bp, Artificial Sequence
  synthetic sequence
agataaggacttg

SEQ ID NO: 16193 - DNA, 13 bp, Artificial Sequence
  synthetic sequence
aaatcaattccgg

SEQ ID NO: 16194 - DNA, 13 bp, Artificial Sequence
  synthetic sequence
gttcccatcattg

SEQ ID NO: 16195 - DNA, 13 bp, Artificial Sequence
  synthetic sequence
caagtgaaaacga

SEQ ID NO: 16196 - DNA, 13 bp, Artificial Sequence
  synthetic sequence
gtatggcatggct

SEQ ID NO: 16197 - DNA, 13 bp, Artificial Sequence
  synthetic sequence
agcgttttctcct

SEQ ID NO: 16198 - DNA, 13 bp, Artificial Sequence
  synthetic sequence
aataatcatttcc

SEQ ID NO: 16199 - DNA, 13 bp, Artificial Sequence
  synthetic sequence
cgtacaatccttg

SEQ ID NO: 16200 - DNA, 13 bp, Artificial Sequence
  synthetic sequence
cgcgttttcagct

SEQ ID NO: 16201 - DNA, 13 bp, Artificial Sequence
  synthetic sequence
tggcgatgggtac

SEQ ID NO: 16202 - DNA, 13 bp, Artificial Sequence
  synthetic sequence
ttcccctttggca

SEQ ID NO: 16203 - DNA, 13 bp, Artificial Sequence
  synthetic sequence
tcattttcggcat

SEQ ID NO: 16204 - DNA, 13 bp, Artificial Sequence
  synthetic sequence
gacggcaacgtca

SEQ ID NO: 16205 - DNA, 13 bp, Artificial Sequence
  synthetic sequence
gaggtggacgtca

SEQ ID NO: 16206 - DNA, 13 bp, Artificial Sequence
  synthetic sequence
ctttcataaagtg

SEQ ID NO: 16207 - DNA, 13 bp, Artificial Sequence
  synthetic sequence
tccaggttggcgg

SEQ ID NO: 16208 - DNA, 13 bp, Artificial Sequence
  synthetic sequence
cgagcgtgcgatg

SEQ ID NO: 16209 - DNA, 13 bp, Artificial Sequence
  synthetic sequence
gtggccgggatga

SEQ ID NO: 16210 - DNA, 13 bp, Artificial Sequence
  synthetic sequence
cgaccagtcgctg

SEQ ID NO: 16211 - DNA, 13 bp, Artificial Sequence
  synthetic sequence
gcttgcgtaggct

SEQ ID NO: 16212 - DNA, 13 bp, Artificial Sequence
  synthetic sequence
cctggtaagcctg

SEQ ID NO: 16213 - DNA, 13 bp, Artificial Sequence
  synthetic sequence
taacgaggcgctg

SEQ ID NO: 16214 - DNA, 13 bp, Artificial Sequence
  synthetic sequence
cacggagccttgg

SEQ ID NO: 16215 - DNA, 13 bp, Artificial Sequence
  synthetic sequence
atagccggcggag

SEQ ID NO: 16216 - DNA, 13 bp, Artificial Sequence
  synthetic sequence
aagtggccacggc

SEQ ID NO: 16217 - DNA, 13 bp, Artificial Sequence
  synthetic sequence
cagggtgttgatc

SEQ ID NO: 16218 - DNA, 13 bp, Artificial Sequence
  synthetic sequence
gttatatactgat

SEQ ID NO: 16219 - DNA, 13 bp, Artificial Sequence
  synthetic sequence
aacggccaggaag

SEQ ID NO: 16220 - DNA, 13 bp, Artificial Sequence
  synthetic sequence
agctcgaaccagc

SEQ ID NO: 16221 - DNA, 13 bp, Artificial Sequence
  synthetic sequence
cactcctccattg

SEQ ID NO: 16222 - DNA, 13 bp, Artificial Sequence
  synthetic sequence
cataataacagct

SEQ ID NO: 16223 - DNA, 13 bp, Artificial Sequence
  synthetic sequence
gatcgggatcgcg

SEQ ID NO: 16224 - DNA, 13 bp, Artificial Sequence
  synthetic sequence
gtcggggtcatga

SEQ ID NO: 16225 - DNA, 13 bp, Artificial Sequence
  synthetic sequence
tctcgacgacggg

SEQ ID NO: 16226 - DNA, 13 bp, Artificial Sequence
  synthetic sequence
cctatctgcgcga

SEQ ID NO: 16227 - DNA, 13 bp, Artificial Sequence
  synthetic sequence
tatttggtggagt

SEQ ID NO: 16228 - DNA, 13 bp, Artificial Sequence
  synthetic sequence
atgtcgccaactt

SEQ ID NO: 16229 - DNA, 13 bp, Artificial Sequence
  synthetic sequence
ccacgacacctta

SEQ ID NO: 16230 - DNA, 13 bp, Artificial Sequence
  synthetic sequence
tcgctcgcgttga

SEQ ID NO: 16231 - DNA, 13 bp, Artificial Sequence
  synthetic sequence
ggcggacatgcat

SEQ ID NO: 16232 - DNA, 13 bp, Artificial Sequence
  synthetic sequence
gtctgctcaaggg

SEQ ID NO: 16233 - DNA, 13 bp, Artificial Sequence
  synthetic sequence
cattgctggtgtg

SEQ ID NO: 16234 - DNA, 13 bp, Artificial Sequence
  synthetic sequence
aggaactcggtca

SEQ ID NO: 16235 - DNA, 13 bp, Artificial Sequence
  synthetic sequence
taagcactttctg

SEQ ID NO: 16236 - DNA, 13 bp, Artificial Sequence
  synthetic sequence
ctatgctggggtt

SEQ ID NO: 16237 - DNA, 13 bp, Artificial Sequence
  synthetic sequence
cacttgctgactt

SEQ ID NO: 16238 - DNA, 13 bp, Artificial Sequence
  synthetic sequence
gcactgctcaggg

SEQ ID NO: 16239 - DNA, 13 bp, Artificial Sequence
  synthetic sequence
catgtagagcgcg

SEQ ID NO: 16240 - DNA, 13 bp, Artificial Sequence
  synthetic sequence
cgttattcgatgc

SEQ ID NO: 16241 - DNA, 13 bp, Artificial Sequence
  synthetic sequence
tacgcccgtggtc

SEQ ID NO: 16242 - DNA, 13 bp, Artificial Sequence
  synthetic sequence
tcgaacagaatat

SEQ ID NO: 16243 - DNA, 13 bp, Artificial Sequence
  synthetic sequence
cgctggttccgtg

SEQ ID NO: 16244 - DNA, 13 bp, Artificial Sequence
  synthetic sequence
ctcccagccaagt

SEQ ID NO: 16245 - DNA, 13 bp, Artificial Sequence
  synthetic sequence
gcggaccacgttc

SEQ ID NO: 16246 - DNA, 13 bp, Artificial Sequence
  synthetic sequence
gcaggtattcgcg

SEQ ID NO: 16247 - DNA, 13 bp, Artificial Sequence
  synthetic sequence
caatatgctgggc

SEQ ID NO: 16248 - DNA, 13 bp, Artificial Sequence
  synthetic sequence
gttgcgggagaag

SEQ ID NO: 16249 - DNA, 13 bp, Artificial Sequence
  synthetic sequence
caatggcgttaat

SEQ ID NO: 16250 - DNA, 13 bp, Artificial Sequence
  synthetic sequence
ttcgcgatgacga

SEQ ID NO: 16251 - DNA, 13 bp, Artificial Sequence
  synthetic sequence
cgtagtcaacaac

SEQ ID NO: 16252 - DNA, 13 bp, Artificial Sequence
  synthetic sequence
atcactcggcatg

SEQ ID NO: 16253 - DNA, 13 bp, Artificial Sequence
  synthetic sequence
tgcttttaaggtt

SEQ ID NO: 16254 - DNA, 13 bp, Artificial Sequence
  synthetic sequence
tggaacggcagct

SEQ ID NO: 16255 - DNA, 13 bp, Artificial Sequence
  synthetic sequence
tttaccgtggcgt

SEQ ID NO: 16256 - DNA, 13 bp, Artificial Sequence
  synthetic sequence
tgacgggacgtat

SEQ ID NO: 16257 - DNA, 13 bp, Artificial Sequence
  synthetic sequence
aggaaagctgcct

SEQ ID NO: 16258 - DNA, 13 bp, Artificial Sequence
  synthetic sequence
ctaggttttaatt

SEQ ID NO: 16259 - DNA, 13 bp, Artificial Sequence
  synthetic sequence
taacttttgtttg

SEQ ID NO: 16260 - DNA, 13 bp, Artificial Sequence
  synthetic sequence
caccgtctgaccc

SEQ ID NO: 16261 - DNA, 13 bp, Artificial Sequence
  synthetic sequence
ttttgcttgggtt

SEQ ID NO: 16262 - DNA, 13 bp, Artificial Sequence
  synthetic sequence
ttaagaagcgcta

SEQ ID NO: 16263 - DNA, 13 bp, Artificial Sequence
  synthetic sequence
agtcccagttgct

SEQ ID NO: 16264 - DNA, 13 bp, Artificial Sequence
  synthetic sequence
acaataatcgtca

SEQ ID NO: 16265 - DNA, 13 bp, Artificial Sequence
  synthetic sequence
agcaatagttaat

SEQ ID NO: 16266 - DNA, 13 bp, Artificial Sequence
  synthetic sequence
gttcctctttggc

SEQ ID NO: 16267 - DNA, 13 bp, Artificial Sequence
  synthetic sequence
atcttgaaattca

SEQ ID NO: 16268 - DNA, 13 bp, Artificial Sequence
  synthetic sequence
gctgttgtccttc

SEQ ID NO: 16269 - DNA, 13 bp, Artificial Sequence
  synthetic sequence
ctggtggtgtccc

SEQ ID NO: 16270 - DNA, 13 bp, Artificial Sequence
  synthetic sequence
gttgcgccattgg

SEQ ID NO: 16271 - DNA, 13 bp, Artificial Sequence
  synthetic sequence
gctgccgcaggaa

SEQ ID NO: 16272 - DNA, 13 bp, Artificial Sequence
  synthetic sequence
taaagattttgct

SEQ ID NO: 16273 - DNA, 13 bp, Artificial Sequence
  synthetic sequence
ccgtggggatctg

SEQ ID NO: 16274 - DNA, 13 bp, Artificial Sequence
  synthetic sequence
gtgcacaccctgt

SEQ ID NO: 16275 - DNA, 13 bp, Artificial Sequence
  synthetic sequence
tttcaggtgtcct

SEQ ID NO: 16276 - DNA, 13 bp, Artificial Sequence
  synthetic sequence
cagcggatttcgt

SEQ ID NO: 16277 - DNA, 13 bp, Artificial Sequence
  synthetic sequence
atgactttcacag

SEQ ID NO: 16278 - DNA, 13 bp, Artificial Sequence
  synthetic sequence
catttggcacccc

SEQ ID NO: 16279 - DNA, 13 bp, Artificial Sequence
  synthetic sequence
tctacacttgaag

SEQ ID NO: 16280 - DNA, 13 bp, Artificial Sequence
  synthetic sequence
tcgatccggagcg

SEQ ID NO: 16281 - DNA, 13 bp, Artificial Sequence
  synthetic sequence
tgcctcaacgcgt

SEQ ID NO: 16282 - DNA, 13 bp, Artificial Sequence
  synthetic sequence
tttaccgacctgt

SEQ ID NO: 16283 - DNA, 13 bp, Artificial Sequence
  synthetic sequence
gcctgtcgccaag

SEQ ID NO: 16284 - DNA, 13 bp, Artificial Sequence
  synthetic sequence
cgtgcgttccagc

SEQ ID NO: 16285 - DNA, 13 bp, Artificial Sequence
  synthetic sequence
atgatatcctctt

SEQ ID NO: 16286 - DNA, 13 bp, Artificial Sequence
  synthetic sequence
cagcatttgcttt

SEQ ID NO: 16287 - DNA, 13 bp, Artificial Sequence
  synthetic sequence
cttagcatattta

SEQ ID NO: 16288 - DNA, 13 bp, Artificial Sequence
  synthetic sequence
tcaaacgatcacg

SEQ ID NO: 16289 - DNA, 13 bp, Artificial Sequence
  synthetic sequence
tttcggcttcagc

SEQ ID NO: 16290 - DNA, 13 bp, Artificial Sequence
  synthetic sequence
tgatgctgttgtc

SEQ ID NO: 16291 - DNA, 13 bp, Artificial Sequence
  synthetic sequence
cgccgcgttcgtt

SEQ ID NO: 16292 - DNA, 13 bp, Artificial Sequence
  synthetic sequence
tcgaacatgcggt

SEQ ID NO: 16293 - DNA, 13 bp, Artificial Sequence
  synthetic sequence
cccagctgcaaca

SEQ ID NO: 16294 - DNA, 13 bp, Artificial Sequence
  synthetic sequence
gaacagcagtata

SEQ ID NO: 16295 - DNA, 13 bp, Artificial Sequence
  synthetic sequence
gtcgtgattgtct

SEQ ID NO: 16296 - DNA, 13 bp, Artificial Sequence
  synthetic sequence
ggtcagatagtat

SEQ ID NO: 16297 - DNA, 13 bp, Artificial Sequence
  synthetic sequence
ggacgtcgattgc

SEQ ID NO: 16298 - DNA, 13 bp, Artificial Sequence
  synthetic sequence
aacgaggagtgga

SEQ ID NO: 16299 - DNA, 13 bp, Artificial Sequence
  synthetic sequence
gcttcgaattgcg

SEQ ID NO: 16300 - DNA, 13 bp, Artificial Sequence
  synthetic sequence
tggcggtgaagcc

SEQ ID NO: 16301 - DNA, 13 bp, Artificial Sequence
  synthetic sequence
gctttggatattt

SEQ ID NO: 16302 - DNA, 13 bp, Artificial Sequence
  synthetic sequence
cggctggaaatcg

SEQ ID NO: 16303 - DNA, 13 bp, Artificial Sequence
  synthetic sequence
acatcagcttatc

SEQ ID NO: 16304 - DNA, 13 bp, Artificial Sequence
  synthetic sequence
catgcccacccgt

SEQ ID NO: 16305 - DNA, 13 bp, Artificial Sequence
  synthetic sequence
cgccccagacatt

SEQ ID NO: 16306 - DNA, 13 bp, Artificial Sequence
  synthetic sequence
ataacagtgatgt

SEQ ID NO: 16307 - DNA, 13 bp, Artificial Sequence
  synthetic sequence
gccgatcgcgatc

SEQ ID NO: 16308 - DNA, 13 bp, Artificial Sequence
  synthetic sequence
gcttgagcacgtg

SEQ ID NO: 16309 - DNA, 13 bp, Artificial Sequence
  synthetic sequence
ttggcgaccaggc

SEQ ID NO: 16310 - DNA, 13 bp, Artificial Sequence
  synthetic sequence
tcgaggtcgctgt

SEQ ID NO: 16311 - DNA, 13 bp, Artificial Sequence
  synthetic sequence
gatgccccaatgc

SEQ ID NO: 16312 - DNA, 13 bp, Artificial Sequence
  synthetic sequence
ttcgtaggtcacg

SEQ ID NO: 16313 - DNA, 13 bp, Artificial Sequence
  synthetic sequence
gcggtagatcgcc

SEQ ID NO: 16314 - DNA, 13 bp, Artificial Sequence
  synthetic sequence
gctcctggcgctt

SEQ ID NO: 16315 - DNA, 13 bp, Artificial Sequence
  synthetic sequence
accccgccaccta

SEQ ID NO: 16316 - DNA, 13 bp, Artificial Sequence
  synthetic sequence
tatggggcagaac

SEQ ID NO: 16317 - DNA, 13 bp, Artificial Sequence
  synthetic sequence
actggattggtac

SEQ ID NO: 16318 - DNA, 13 bp, Artificial Sequence
  synthetic sequence
cggtgagaatggc

SEQ ID NO: 16319 - DNA, 13 bp, Artificial Sequence
  synthetic sequence
gtggaaatcgcca

SEQ ID NO: 16320 - DNA, 13 bp, Artificial Sequence
  synthetic sequence
cacgctgcgcatc

SEQ ID NO: 16321 - DNA, 13 bp, Artificial Sequence
  synthetic sequence
aaggataaggcca

SEQ ID NO: 16322 - DNA, 13 bp, Artificial Sequence
  synthetic sequence
attgaattagaca

SEQ ID NO: 16323 - DNA, 13 bp, Artificial Sequence
  synthetic sequence
agtcgcattcggc

SEQ ID NO: 16324 - DNA, 13 bp, Artificial Sequence
  synthetic sequence
catattgttctaa

SEQ ID NO: 16325 - DNA, 13 bp, Artificial Sequence
  synthetic sequence
tctgcatcaaagg

SEQ ID NO: 16326 - DNA, 13 bp, Artificial Sequence
  synthetic sequence
tggcgatgtccgc

SEQ ID NO: 16327 - DNA, 13 bp, Artificial Sequence
  synthetic sequence
atcgtgccagagg

SEQ ID NO: 16328 - DNA, 13 bp, Artificial Sequence
  synthetic sequence
ggacacgctgtgg

SEQ ID NO: 16329 - DNA, 13 bp, Artificial Sequence
  synthetic sequence
cgaagcgatggtc

SEQ ID NO: 16330 - DNA, 13 bp, Artificial Sequence
  synthetic sequence
tcgccatttccga

SEQ ID NO: 16331 - DNA, 13 bp, Artificial Sequence
  synthetic sequence
gatcactggtgcc

SEQ ID NO: 16332 - DNA, 13 bp, Artificial Sequence
  synthetic sequence
ttacttcccaacc

SEQ ID NO: 16333 - DNA, 13 bp, Artificial Sequence
  synthetic sequence
tagcagtgaagta

SEQ ID NO: 16334 - DNA, 13 bp, Artificial Sequence
  synthetic sequence
tagttgtgtgttg

SEQ ID NO: 16335 - DNA, 13 bp, Artificial Sequence
  synthetic sequence
ttctgcgcgagct

SEQ ID NO: 16336 - DNA, 13 bp, Artificial Sequence
  synthetic sequence
ccagcatcaagct

SEQ ID NO: 16337 - DNA, 13 bp, Artificial Sequence
  synthetic sequence
gagtctggctcat

SEQ ID NO: 16338 - DNA, 13 bp, Artificial Sequence
  synthetic sequence
cagcttccgtgag

SEQ ID NO: 16339 - DNA, 13 bp, Artificial Sequence
  synthetic sequence
ggaattgtggatg

SEQ ID NO: 16340 - DNA, 13 bp, Artificial Sequence
  synthetic sequence
tttcggcaaagcc

SEQ ID NO: 16341 - DNA, 13 bp, Artificial Sequence
  synthetic sequence
gacagtgttattc

SEQ ID NO: 16342 - DNA, 13 bp, Artificial Sequence
  synthetic sequence
acttttcgtcggt

SEQ ID NO: 16343 - DNA, 13 bp, Artificial Sequence
  synthetic sequence
atgtgagcggtaa

SEQ ID NO: 16344 - DNA, 13 bp, Artificial Sequence
  synthetic sequence
gaccctcgatgct

SEQ ID NO: 16345 - DNA, 13 bp, Artificial Sequence
  synthetic sequence
ggtccatgctcgt

SEQ ID NO: 16346 - DNA, 13 bp, Artificial Sequence
  synthetic sequence
gcattcgttgcta

SEQ ID NO: 16347 - DNA, 13 bp, Artificial Sequence
  synthetic sequence
ccgttgtaacgtt

SEQ ID NO: 16348 - DNA, 13 bp, Artificial Sequence
  synthetic sequence
gctgcaacgacag

SEQ ID NO: 16349 - DNA, 13 bp, Artificial Sequence
  synthetic sequence
agtagtgagttaa

SEQ ID NO: 16350 - DNA, 13 bp, Artificial Sequence
  synthetic sequence
atcgaaccgcgcc

SEQ ID NO: 16351 - DNA, 13 bp, Artificial Sequence
  synthetic sequence
gaaacccggcttt

SEQ ID NO: 16352 - DNA, 13 bp, Artificial Sequence
  synthetic sequence
gcgagcaccagga

SEQ ID NO: 16353 - DNA, 13 bp, Artificial Sequence
  synthetic sequence
gtcgtagtcgaaa

SEQ ID NO: 16354 - DNA, 13 bp, Artificial Sequence
  synthetic sequence
gtgctgcatgaaa

SEQ ID NO: 16355 - DNA, 13 bp, Artificial Sequence
  synthetic sequence
cgtccgtactctg

SEQ ID NO: 16356 - DNA, 13 bp, Artificial Sequence
  synthetic sequence
agaagagctctac

SEQ ID NO: 16357 - DNA, 13 bp, Artificial Sequence
  synthetic sequence
tctggttggcgaa

SEQ ID NO: 16358 - DNA, 13 bp, Artificial Sequence
  synthetic sequence
gctcaactccctg

SEQ ID NO: 16359 - DNA, 13 bp, Artificial Sequence
  synthetic sequence
ctggtcgaagcga

SEQ ID NO: 16360 - DNA, 13 bp, Artificial Sequence
  synthetic sequence
tttgtttgggtgt

SEQ ID NO: 16361 - DNA, 13 bp, Artificial Sequence
  synthetic sequence
cggtgttctgttc

SEQ ID NO: 16362 - DNA, 13 bp, Artificial Sequence
  synthetic sequence
gaggggatagcag

SEQ ID NO: 16363 - DNA, 13 bp, Artificial Sequence
  synthetic sequence
ggcctgcatattc

SEQ ID NO: 16364 - DNA, 13 bp, Artificial Sequence
  synthetic sequence
cgccatcctcctg

SEQ ID NO: 16365 - DNA, 13 bp, Artificial Sequence
  synthetic sequence
tactattagctgg

SEQ ID NO: 16366 - DNA, 13 bp, Artificial Sequence
  synthetic sequence
atccaggatccgc

SEQ ID NO: 16367 - DNA, 13 bp, Artificial Sequence
  synthetic sequence
cgatgtaccacca

SEQ ID NO: 16368 - DNA, 13 bp, Artificial Sequence
  synthetic sequence
gcgctgatgctca

SEQ ID NO: 16369 - DNA, 13 bp, Artificial Sequence
  synthetic sequence
gttttcggaacgt

SEQ ID NO: 16370 - DNA, 13 bp, Artificial Sequence
  synthetic sequence
taggcattgaatc

SEQ ID NO: 16371 - DNA, 13 bp, Artificial Sequence
  synthetic sequence
cgctgcgtaaggt

SEQ ID NO: 16372 - DNA, 13 bp, Artificial Sequence
  synthetic sequence
tcgaatcctcgaa

SEQ ID NO: 16373 - DNA, 13 bp, Artificial Sequence
  synthetic sequence
gtcgcctggttgt

SEQ ID NO: 16374 - DNA, 13 bp, Artificial Sequence
  synthetic sequence
catgtctcaaaat

SEQ ID NO: 16375 - DNA, 13 bp, Artificial Sequence
  synthetic sequence
cgtactttctgca

SEQ ID NO: 16376 - DNA, 13 bp, Artificial Sequence
  synthetic sequence
gaagaatactggc

SEQ ID NO: 16377 - DNA, 13 bp, Artificial Sequence
  synthetic sequence
ttaattgtcggta

SEQ ID NO: 16378 - DNA, 13 bp, Artificial Sequence
  synthetic sequence
ccatagcgttaag

SEQ ID NO: 16379 - DNA, 13 bp, Artificial Sequence
  synthetic sequence
aaggagcgaagcg

SEQ ID NO: 16380 - DNA, 13 bp, Artificial Sequence
  synthetic sequence
cacgtcgactttc

SEQ ID NO: 16381 - DNA, 13 bp, Artificial Sequence
  synthetic sequence
ttttgaatatgtg

SEQ ID NO: 16382 - DNA, 13 bp, Artificial Sequence
  synthetic sequence
aggccacaccgaa

SEQ ID NO: 16383 - DNA, 13 bp, Artificial Sequence
  synthetic sequence
cggtattgccgtt

SEQ ID NO: 16384 - DNA, 13 bp, Artificial Sequence
  synthetic sequence
caggcctacgaga

SEQ ID NO: 16385 - DNA, 13 bp, Artificial Sequence
  synthetic sequence
tcgacgcgtacca

SEQ ID NO: 16386 - DNA, 13 bp, Artificial Sequence
  synthetic sequence
ccaatgcaccttc

SEQ ID NO: 16387 - DNA, 13 bp, Artificial Sequence
  synthetic sequence
ggatgagatgcga

SEQ ID NO: 16388 - DNA, 13 bp, Artificial Sequence
  synthetic sequence
atgctcgtgcagc

SEQ ID NO: 16389 - DNA, 13 bp, Artificial Sequence
  synthetic sequence
tgctccagcgtgg

SEQ ID NO: 16390 - DNA, 13 bp, Artificial Sequence
  synthetic sequence
atttcccttgaaa

SEQ ID NO: 16391 - DNA, 13 bp, Artificial Sequence
  synthetic sequence
ctaaaacaactat

SEQ ID NO: 16392 - DNA, 13 bp, Artificial Sequence
  synthetic sequence
actgcacagccac

SEQ ID NO: 16393 - DNA, 13 bp, Artificial Sequence
  synthetic sequence
ttcatcgtccgga

SEQ ID NO: 16394 - DNA, 13 bp, Artificial Sequence
  synthetic sequence
acgaatgcctggt

SEQ ID NO: 16395 - DNA, 13 bp, Artificial Sequence
  synthetic sequence
gagtatatcccct

SEQ ID NO: 16396 - DNA, 13 bp, Artificial Sequence
  synthetic sequence
gagcctgcgccat

SEQ ID NO: 16397 - DNA, 13 bp, Artificial Sequence
  synthetic sequence
aatctgggaggta

SEQ ID NO: 16398 - DNA, 13 bp, Artificial Sequence
  synthetic sequence
gtcgcgctcaacc

SEQ ID NO: 16399 - DNA, 13 bp, Artificial Sequence
  synthetic sequence
tatacgatggtgg

SEQ ID NO: 16400 - DNA, 13 bp, Artificial Sequence
  synthetic sequence
gcttttatgcttg

SEQ ID NO: 16401 - DNA, 13 bp, Artificial Sequence
  synthetic sequence
cttgcagagcctg

SEQ ID NO: 16402 - DNA, 13 bp, Artificial Sequence
  synthetic sequence
ttttctgatgccc

SEQ ID NO: 16403 - DNA, 13 bp, Artificial Sequence
  synthetic sequence
cacagggaggaat

SEQ ID NO: 16404 - DNA, 13 bp, Artificial Sequence
  synthetic sequence
gacgttggccatg

SEQ ID NO: 16405 - DNA, 13 bp, Artificial Sequence
  synthetic sequence
tcagataatccga

SEQ ID NO: 16406 - DNA, 13 bp, Artificial Sequence
  synthetic sequence
aggatgagaggct

SEQ ID NO: 16407 - DNA, 13 bp, Artificial Sequence
  synthetic sequence
ctgttgccaactt

SEQ ID NO: 16408 - DNA, 13 bp, Artificial Sequence
  synthetic sequence
ttctggcttatca

SEQ ID NO: 16409 - DNA, 13 bp, Artificial Sequence
  synthetic sequence
aagatcataccgg

SEQ ID NO: 16410 - DNA, 13 bp, Artificial Sequence
  synthetic sequence
catgagagtgact

SEQ ID NO: 16411 - DNA, 13 bp, Artificial Sequence
  synthetic sequence
gtccaaccttctt

SEQ ID NO: 16412 - DNA, 13 bp, Artificial Sequence
  synthetic sequence
tcgggctcttgac

SEQ ID NO: 16413 - DNA, 13 bp, Artificial Sequence
  synthetic sequence
attaatggcactt

SEQ ID NO: 16414 - DNA, 13 bp, Artificial Sequence
  synthetic sequence
catatcatgaaag

SEQ ID NO: 16415 - DNA, 13 bp, Artificial Sequence
  synthetic sequence
gcggaacgacgtc

SEQ ID NO: 16416 - DNA, 13 bp, Artificial Sequence
  synthetic sequence
aaaggcaaaatat

SEQ ID NO: 16417 - DNA, 13 bp, Artificial Sequence
  synthetic sequence
aaacatggaaaag

SEQ ID NO: 16418 - DNA, 13 bp, Artificial Sequence
  synthetic sequence
gtgcgctggtcac

SEQ ID NO: 16419 - DNA, 13 bp, Artificial Sequence
  synthetic sequence
gtaataacttgac

SEQ ID NO: 16420 - DNA, 13 bp, Artificial Sequence
  synthetic sequence
aaggttaattgga

SEQ ID NO: 16421 - DNA, 13 bp, Artificial Sequence
  synthetic sequence
aacgtgtggcgtc

SEQ ID NO: 16422 - DNA, 13 bp, Artificial Sequence
  synthetic sequence
gcggaggcacgat

SEQ ID NO: 16423 - DNA, 13 bp, Artificial Sequence
  synthetic sequence
ctgattagcggta

SEQ ID NO: 16424 - DNA, 13 bp, Artificial Sequence
  synthetic sequence
tagaatatgcacc

SEQ ID NO: 16425 - DNA, 13 bp, Artificial Sequence
  synthetic sequence
ccgaatgtcggtt

SEQ ID NO: 16426 - DNA, 13 bp, Artificial Sequence
  synthetic sequence
agcactcttggtg

SEQ ID NO: 16427 - DNA, 13 bp, Artificial Sequence
  synthetic sequence
gcggcgaatcttt

SEQ ID NO: 16428 - DNA, 13 bp, Artificial Sequence
  synthetic sequence
atggtggtattct

SEQ ID NO: 16429 - DNA, 13 bp, Artificial Sequence
  synthetic sequence
ctgcggacgacga

SEQ ID NO: 16430 - DNA, 13 bp, Artificial Sequence
  synthetic sequence
cggagttcatcgg

SEQ ID NO: 16431 - DNA, 13 bp, Artificial Sequence
  synthetic sequence
attaagcagactg

SEQ ID NO: 16432 - DNA, 13 bp, Artificial Sequence
  synthetic sequence
tggctccttgtgc

SEQ ID NO: 16433 - DNA, 13 bp, Artificial Sequence
  synthetic sequence
tgagttgcttctt

SEQ ID NO: 16434 - DNA, 13 bp, Artificial Sequence
  synthetic sequence
ccaggtgagcgga

SEQ ID NO: 16435 - DNA, 13 bp, Artificial Sequence
  synthetic sequence
catgaagcaaata

SEQ ID NO: 16436 - DNA, 13 bp, Artificial Sequence
  synthetic sequence
ggattctcctcgt

SEQ ID NO: 16437 - DNA, 13 bp, Artificial Sequence
  synthetic sequence
gttcgatcctgcc

SEQ ID NO: 16438 - DNA, 13 bp, Artificial Sequence
  synthetic sequence
aacgcttttaaac

SEQ ID NO: 16439 - DNA, 13 bp, Artificial Sequence
  synthetic sequence
caccgccacgaaa

SEQ ID NO: 16440 - DNA, 13 bp, Artificial Sequence
  synthetic sequence
gaacgcaaacttg

SEQ ID NO: 16441 - DNA, 13 bp, Artificial Sequence
  synthetic sequence
tcgccttcggcct

SEQ ID NO: 16442 - DNA, 13 bp, Artificial Sequence
  synthetic sequence
cattgccgatcgc

SEQ ID NO: 16443 - DNA, 13 bp, Artificial Sequence
  synthetic sequence
ctgcagcttgaag

SEQ ID NO: 16444 - DNA, 13 bp, Artificial Sequence
  synthetic sequence
aatgtctgaagag

SEQ ID NO: 16445 - DNA, 13 bp, Artificial Sequence
  synthetic sequence
gaaagcgcgaaag

SEQ ID NO: 16446 - DNA, 13 bp, Artificial Sequence
  synthetic sequence
aaacggattagaa

SEQ ID NO: 16447 - DNA, 13 bp, Artificial Sequence
  synthetic sequence
tcggcaccaggct

SEQ ID NO: 16448 - DNA, 13 bp, Artificial Sequence
  synthetic sequence
gcagctccatcac

SEQ ID NO: 16449 - DNA, 13 bp, Artificial Sequence
  synthetic sequence
agcacgaacatct

SEQ ID NO: 16450 - DNA, 13 bp, Artificial Sequence
  synthetic sequence
gcgcgtctgttat

SEQ ID NO: 16451 - DNA, 13 bp, Artificial Sequence
  synthetic sequence
gagtgctggtgag

SEQ ID NO: 16452 - DNA, 13 bp, Artificial Sequence
  synthetic sequence
cgatcaaggattc

SEQ ID NO: 16453 - DNA, 13 bp, Artificial Sequence
  synthetic sequence
gcagtaatttggc

SEQ ID NO: 16454 - DNA, 13 bp, Artificial Sequence
  synthetic sequence
tagtttaggcgtt

SEQ ID NO: 16455 - DNA, 13 bp, Artificial Sequence
  synthetic sequence
agccaaatagcga

SEQ ID NO: 16456 - DNA, 13 bp, Artificial Sequence
  synthetic sequence
gttttgttacctc

SEQ ID NO: 16457 - DNA, 13 bp, Artificial Sequence
  synthetic sequence
acggagaatggaa

SEQ ID NO: 16458 - DNA, 13 bp, Artificial Sequence
  synthetic sequence
tacgcctacttcg

SEQ ID NO: 16459 - DNA, 13 bp, Artificial Sequence
  synthetic sequence
cgcttcatgaact

SEQ ID NO: 16460 - DNA, 13 bp, Artificial Sequence
  synthetic sequence
tagttagagtaag

SEQ ID NO: 16461 - DNA, 13 bp, Artificial Sequence
  synthetic sequence
tgcgcggtcagta

SEQ ID NO: 16462 - DNA, 13 bp, Artificial Sequence
  synthetic sequence
cgggtcgaaggtg

SEQ ID NO: 16463 - DNA, 13 bp, Artificial Sequence
  synthetic sequence
tcagctcaccgat

SEQ ID NO: 16464 - DNA, 13 bp, Artificial Sequence
  synthetic sequence
cgtttgtgccata

SEQ ID NO: 16465 - DNA, 13 bp, Artificial Sequence
  synthetic sequence
ttcctttgggtag

SEQ ID NO: 16466 - DNA, 13 bp, Artificial Sequence
  synthetic sequence
cggtgcgcaggaa

SEQ ID NO: 16467 - DNA, 13 bp, Artificial Sequence
  synthetic sequence
gagatagcagaaa

SEQ ID NO: 16468 - DNA, 13 bp, Artificial Sequence
  synthetic sequence
gaaagggtggaga

SEQ ID NO: 16469 - DNA, 13 bp, Artificial Sequence
  synthetic sequence
ggccatcaacgcg

SEQ ID NO: 16470 - DNA, 13 bp, Artificial Sequence
  synthetic sequence
gccacaaccgtca

SEQ ID NO: 16471 - DNA, 13 bp, Artificial Sequence
  synthetic sequence
cgtaggtggcata

SEQ ID NO: 16472 - DNA, 13 bp, Artificial Sequence
  synthetic sequence
atactgagattct

SEQ ID NO: 16473 - DNA, 13 bp, Artificial Sequence
  synthetic sequence
gcgtgagttgctg

SEQ ID NO: 16474 - DNA, 13 bp, Artificial Sequence
  synthetic sequence
aattagaaagctg

SEQ ID NO: 16475 - DNA, 13 bp, Artificial Sequence
  synthetic sequence
aaaggcgcgtttt

SEQ ID NO: 16476 - DNA, 13 bp, Artificial Sequence
  synthetic sequence
tagaaacccgcaa

SEQ ID NO: 16477 - DNA, 13 bp, Artificial Sequence
  synthetic sequence
tgtgctgacgctg

SEQ ID NO: 16478 - DNA, 13 bp, Artificial Sequence
  synthetic sequence
agtttggttgccc

SEQ ID NO: 16479 - DNA, 13 bp, Artificial Sequence
  synthetic sequence
atagatcgaccca

SEQ ID NO: 16480 - DNA, 13 bp, Artificial Sequence
  synthetic sequence
aattgtacctctg

SEQ ID NO: 16481 - DNA, 13 bp, Artificial Sequence
  synthetic sequence
tttcgacaatgca

SEQ ID NO: 16482 - DNA, 13 bp, Artificial Sequence
  synthetic sequence
tgggcgtgttgtt

SEQ ID NO: 16483 - DNA, 13 bp, Artificial Sequence
  synthetic sequence
tgaagctgttatc

SEQ ID NO: 16484 - DNA, 13 bp, Artificial Sequence
  synthetic sequence
ctgcacggcaaaa

SEQ ID NO: 16485 - DNA, 13 bp, Artificial Sequence
  synthetic sequence
ttgaccctggcct

SEQ ID NO: 16486 - DNA, 13 bp, Artificial Sequence
  synthetic sequence
gtcaacatcccca

SEQ ID NO: 16487 - DNA, 13 bp, Artificial Sequence
  synthetic sequence
catgcaccgcgac

SEQ ID NO: 16488 - DNA, 13 bp, Artificial Sequence
  synthetic sequence
agttaaacgggcg

SEQ ID NO: 16489 - DNA, 13 bp, Artificial Sequence
  synthetic sequence
tttgaaccactgt

SEQ ID NO: 16490 - DNA, 13 bp, Artificial Sequence
  synthetic sequence
ctgctcatcaccc

SEQ ID NO: 16491 - DNA, 13 bp, Artificial Sequence
  synthetic sequence
acagttgcagcgt

SEQ ID NO: 16492 - DNA, 13 bp, Artificial Sequence
  synthetic sequence
gaccgtaattatc

SEQ ID NO: 16493 - DNA, 13 bp, Artificial Sequence
  synthetic sequence
tcttcactagttc

SEQ ID NO: 16494 - DNA, 13 bp, Artificial Sequence
  synthetic sequence
tcctcggcaccgt

SEQ ID NO: 16495 - DNA, 13 bp, Artificial Sequence
  synthetic sequence
tggacaggtctcc

SEQ ID NO: 16496 - DNA, 13 bp, Artificial Sequence
  synthetic sequence
tgccattgccata

SEQ ID NO: 16497 - DNA, 13 bp, Artificial Sequence
  synthetic sequence
ctacggcaacatc

SEQ ID NO: 16498 - DNA, 13 bp, Artificial Sequence
  synthetic sequence
accacgatatggg

SEQ ID NO: 16499 - DNA, 13 bp, Artificial Sequence
  synthetic sequence
atattgacggcaa

SEQ ID NO: 16500 - DNA, 13 bp, Artificial Sequence
  synthetic sequence
ttacaacggactg

SEQ ID NO: 16501 - DNA, 13 bp, Artificial Sequence
  synthetic sequence
cagtgataaagaa

SEQ ID NO: 16502 - DNA, 13 bp, Artificial Sequence
  synthetic sequence
cggtacggcgaag

SEQ ID NO: 16503 - DNA, 13 bp, Artificial Sequence
  synthetic sequence
ttccttcttcgcg

SEQ ID NO: 16504 - DNA, 13 bp, Artificial Sequence
  synthetic sequence
taaaagcgaatat

SEQ ID NO: 16505 - DNA, 13 bp, Artificial Sequence
  synthetic sequence
ggatgcgctcggt

SEQ ID NO: 16506 - DNA, 13 bp, Artificial Sequence
  synthetic sequence
gctgccccacttg

SEQ ID NO: 16507 - DNA, 13 bp, Artificial Sequence
  synthetic sequence
aatcgactcaata

SEQ ID NO: 16508 - DNA, 13 bp, Artificial Sequence
  synthetic sequence
acatgccggtaga

SEQ ID NO: 16509 - DNA, 13 bp, Artificial Sequence
  synthetic sequence
acctcccaactgt

SEQ ID NO: 16510 - DNA, 13 bp, Artificial Sequence
  synthetic sequence
agccgctgttcca

SEQ ID NO: 16511 - DNA, 13 bp, Artificial Sequence
  synthetic sequence
acaccacagccca

SEQ ID NO: 16512 - DNA, 13 bp, Artificial Sequence
  synthetic sequence
ggccttgtggaag

SEQ ID NO: 16513 - DNA, 13 bp, Artificial Sequence
  synthetic sequence
cttgttttcggta

SEQ ID NO: 16514 - DNA, 13 bp, Artificial Sequence
  synthetic sequence
tgagtatagcttt

SEQ ID NO: 16515 - DNA, 13 bp, Artificial Sequence
  synthetic sequence
ttcgacgttttga

SEQ ID NO: 16516 - DNA, 13 bp, Artificial Sequence
  synthetic sequence
taagccaatgcca

SEQ ID NO: 16517 - DNA, 13 bp, Artificial Sequence
  synthetic sequence
acgccaaagccga

SEQ ID NO: 16518 - DNA, 13 bp, Artificial Sequence
  synthetic sequence
tctgtaatcaaag

SEQ ID NO: 16519 - DNA, 13 bp, Artificial Sequence
  synthetic sequence
tcggggatattaa

SEQ ID NO: 16520 - DNA, 13 bp, Artificial Sequence
  synthetic sequence
accgccaatacta

SEQ ID NO: 16521 - DNA, 13 bp, Artificial Sequence
  synthetic sequence
agctatatcgaag

SEQ ID NO: 16522 - DNA, 13 bp, Artificial Sequence
  synthetic sequence
tttatcttcttca

SEQ ID NO: 16523 - DNA, 13 bp, Artificial Sequence
  synthetic sequence
aagcgcacctcga

SEQ ID NO: 16524 - DNA, 13 bp, Artificial Sequence
  synthetic sequence
cagctacgagtgg

SEQ ID NO: 16525 - DNA, 13 bp, Artificial Sequence
  synthetic sequence
acagaaagactaa

SEQ ID NO: 16526 - DNA, 13 bp, Artificial Sequence
  synthetic sequence
ggacatgaccaca

SEQ ID NO: 16527 - DNA, 13 bp, Artificial Sequence
  synthetic sequence
ccagtcagctcct

SEQ ID NO: 16528 - DNA, 13 bp, Artificial Sequence
  synthetic sequence
gaagccatcacat

SEQ ID NO: 16529 - DNA, 13 bp, Artificial Sequence
  synthetic sequence
tcaacacccaggg

SEQ ID NO: 16530 - DNA, 13 bp, Artificial Sequence
  synthetic sequence
cctggagcgctac

SEQ ID NO: 16531 - DNA, 13 bp, Artificial Sequence
  synthetic sequence
tcgcggcagtaca

SEQ ID NO: 16532 - DNA, 13 bp, Artificial Sequence
  synthetic sequence
aagaagccggtgc

SEQ ID NO: 16533 - DNA, 13 bp, Artificial Sequence
  synthetic sequence
acgacgggtcatt

SEQ ID NO: 16534 - DNA, 13 bp, Artificial Sequence
  synthetic sequence
acaccttcaacca

SEQ ID NO: 16535 - DNA, 13 bp, Artificial Sequence
  synthetic sequence
gaacttcacgcgc

SEQ ID NO: 16536 - DNA, 13 bp, Artificial Sequence
  synthetic sequence
ttaaaggatattc

SEQ ID NO: 16537 - DNA, 13 bp, Artificial Sequence
  synthetic sequence
gaaggggaattcg

SEQ ID NO: 16538 - DNA, 13 bp, Artificial Sequence
  synthetic sequence
ctgttgcaccgtc

SEQ ID NO: 16539 - DNA, 13 bp, Artificial Sequence
  synthetic sequence
agggcaccatggt

SEQ ID NO: 16540 - DNA, 13 bp, Artificial Sequence
  synthetic sequence
ccaagccgtgttg

SEQ ID NO: 16541 - DNA, 13 bp, Artificial Sequence
  synthetic sequence
ggcggcgttcttc

SEQ ID NO: 16542 - DNA, 13 bp, Artificial Sequence
  synthetic sequence
ttgctaaggctga

SEQ ID NO: 16543 - DNA, 13 bp, Artificial Sequence
  synthetic sequence
accattgacgcgc

SEQ ID NO: 16544 - DNA, 13 bp, Artificial Sequence
  synthetic sequence
aattgaccgcttg

SEQ ID NO: 16545 - DNA, 13 bp, Artificial Sequence
  synthetic sequence
ccagcccgttagg

SEQ ID NO: 16546 - DNA, 13 bp, Artificial Sequence
  synthetic sequence
cgtgttcgcggtg

SEQ ID NO: 16547 - DNA, 13 bp, Artificial Sequence
  synthetic sequence
gagtttccatgcc

SEQ ID NO: 16548 - DNA, 13 bp, Artificial Sequence
  synthetic sequence
tagcaagcgcatc

SEQ ID NO: 16549 - DNA, 13 bp, Artificial Sequence
  synthetic sequence
gaaagatccacta

SEQ ID NO: 16550 - DNA, 13 bp, Artificial Sequence
  synthetic sequence
gcgctttcttgtt

SEQ ID NO: 16551 - DNA, 13 bp, Artificial Sequence
  synthetic sequence
tcgttacggagtt

SEQ ID NO: 16552 - DNA, 13 bp, Artificial Sequence
  synthetic sequence
ctcgccagcaagc

SEQ ID NO: 16553 - DNA, 13 bp, Artificial Sequence
  synthetic sequence
cccaagtaaccag

SEQ ID NO: 16554 - DNA, 13 bp, Artificial Sequence
  synthetic sequence
gcatcacttcttc

SEQ ID NO: 16555 - DNA, 13 bp, Artificial Sequence
  synthetic sequence
tgattgtcttcat

SEQ ID NO: 16556 - DNA, 13 bp, Artificial Sequence
  synthetic sequence
cgaccaatgcggt

SEQ ID NO: 16557 - DNA, 13 bp, Artificial Sequence
  synthetic sequence
gctgaaggatgtg

SEQ ID NO: 16558 - DNA, 13 bp, Artificial Sequence
  synthetic sequence
gaatccaaatttg

SEQ ID NO: 16559 - DNA, 13 bp, Artificial Sequence
  synthetic sequence
tgttcaataagcc

SEQ ID NO: 16560 - DNA, 13 bp, Artificial Sequence
  synthetic sequence
ttcagccacgcgt

SEQ ID NO: 16561 - DNA, 13 bp, Artificial Sequence
  synthetic sequence
gccaaatcctttg

SEQ ID NO: 16562 - DNA, 13 bp, Artificial Sequence
  synthetic sequence
gcgtggtcagcct

SEQ ID NO: 16563 - DNA, 13 bp, Artificial Sequence
  synthetic sequence
tcacgctgaagaa

SEQ ID NO: 16564 - DNA, 13 bp, Artificial Sequence
  synthetic sequence
agtctgtcactcc

SEQ ID NO: 16565 - DNA, 13 bp, Artificial Sequence
  synthetic sequence
aaggcaatgaaat

SEQ ID NO: 16566 - DNA, 13 bp, Artificial Sequence
  synthetic sequence
aacatggcagaaa

SEQ ID NO: 16567 - DNA, 13 bp, Artificial Sequence
  synthetic sequence
atggattatcagc

SEQ ID NO: 16568 - DNA, 13 bp, Artificial Sequence
  synthetic sequence
acggcctctttgg

SEQ ID NO: 16569 - DNA, 13 bp, Artificial Sequence
  synthetic sequence
tgaaagacgtggc

SEQ ID NO: 16570 - DNA, 13 bp, Artificial Sequence
  synthetic sequence
tcatacttcgcgc

SEQ ID NO: 16571 - DNA, 13 bp, Artificial Sequence
  synthetic sequence
gttcgacgttctc

SEQ ID NO: 16572 - DNA, 13 bp, Artificial Sequence
  synthetic sequence
ccacggtgaaacc

SEQ ID NO: 16573 - DNA, 13 bp, Artificial Sequence
  synthetic sequence
attgtcctgttaa

SEQ ID NO: 16574 - DNA, 13 bp, Artificial Sequence
  synthetic sequence
ctcatattcggca

SEQ ID NO: 16575 - DNA, 13 bp, Artificial Sequence
  synthetic sequence
ccgctgttccacc

SEQ ID NO: 16576 - DNA, 13 bp, Artificial Sequence
  synthetic sequence
gagcatcaaatga

SEQ ID NO: 16577 - DNA, 13 bp, Artificial Sequence
  synthetic sequence
cggcaccatttgg

SEQ ID NO: 16578 - DNA, 13 bp, Artificial Sequence
  synthetic sequence
acctatcaggcga

SEQ ID NO: 16579 - DNA, 13 bp, Artificial Sequence
  synthetic sequence
tgaacattccgct

SEQ ID NO: 16580 - DNA, 13 bp, Artificial Sequence
  synthetic sequence
gaacgtcgagcgc

SEQ ID NO: 16581 - DNA, 13 bp, Artificial Sequence
  synthetic sequence
tctgtctgcgagc

SEQ ID NO: 16582 - DNA, 13 bp, Artificial Sequence
  synthetic sequence
ataaaaggtttgt

SEQ ID NO: 16583 - DNA, 13 bp, Artificial Sequence
  synthetic sequence
ccaaccgagtaac

SEQ ID NO: 16584 - DNA, 13 bp, Artificial Sequence
  synthetic sequence
gttccgatggctt

SEQ ID NO: 16585 - DNA, 13 bp, Artificial Sequence
  synthetic sequence
acttgttcttgcg

SEQ ID NO: 16586 - DNA, 13 bp, Artificial Sequence
  synthetic sequence
cgcaagagttcgg

SEQ ID NO: 16587 - DNA, 13 bp, Artificial Sequence
  synthetic sequence
attttccaatcgt

SEQ ID NO: 16588 - DNA, 13 bp, Artificial Sequence
  synthetic sequence
tatttggtacagt

SEQ ID NO: 16589 - DNA, 13 bp, Artificial Sequence
  synthetic sequence
ggctattctccat

SEQ ID NO: 16590 - DNA, 13 bp, Artificial Sequence
  synthetic sequence
gattttggaaaca

SEQ ID NO: 16591 - DNA, 13 bp, Artificial Sequence
  synthetic sequence
tgttgctgtacag

SEQ ID NO: 16592 - DNA, 13 bp, Artificial Sequence
  synthetic sequence
gcatcaaaccgaa

SEQ ID NO: 16593 - DNA, 13 bp, Artificial Sequence
  synthetic sequence
taaaatgtcatgt

SEQ ID NO: 16594 - DNA, 13 bp, Artificial Sequence
  synthetic sequence
tgttacgaaagac

SEQ ID NO: 16595 - DNA, 13 bp, Artificial Sequence
  synthetic sequence
gcggtgatttaca

SEQ ID NO: 16596 - DNA, 13 bp, Artificial Sequence
  synthetic sequence
gctttcatactga

SEQ ID NO: 16597 - DNA, 13 bp, Artificial Sequence
  synthetic sequence
agcagcttctcgc

SEQ ID NO: 16598 - DNA, 13 bp, Artificial Sequence
  synthetic sequence
ggaccagagatcg

SEQ ID NO: 16599 - DNA, 13 bp, Artificial Sequence
  synthetic sequence
ctgcggtcctcca

SEQ ID NO: 16600 - DNA, 13 bp, Artificial Sequence
  synthetic sequence
tatctgcgacaaa

SEQ ID NO: 16601 - DNA, 13 bp, Artificial Sequence
  synthetic sequence
ttacttggcggat

SEQ ID NO: 16602 - DNA, 13 bp, Artificial Sequence
  synthetic sequence
tggatttatcggc

SEQ ID NO: 16603 - DNA, 13 bp, Artificial Sequence
  synthetic sequence
attggtttgctgc

SEQ ID NO: 16604 - DNA, 13 bp, Artificial Sequence
  synthetic sequence
ttctgaccattgc

SEQ ID NO: 16605 - DNA, 13 bp, Artificial Sequence
  synthetic sequence
ctacattttgtcc

SEQ ID NO: 16606 - DNA, 13 bp, Artificial Sequence
  synthetic sequence
ggtaagcaggcgc

SEQ ID NO: 16607 - DNA, 13 bp, Artificial Sequence
  synthetic sequence
tgcagaatgtcgt

SEQ ID NO: 16608 - DNA, 13 bp, Artificial Sequence
  synthetic sequence
aacaatttcccca

SEQ ID NO: 16609 - DNA, 13 bp, Artificial Sequence
  synthetic sequence
caaggccagtgac

SEQ ID NO: 16610 - DNA, 13 bp, Artificial Sequence
  synthetic sequence
cattcattttcct

SEQ ID NO: 16611 - DNA, 13 bp, Artificial Sequence
  synthetic sequence
tcaagcattttat

SEQ ID NO: 16612 - DNA, 13 bp, Artificial Sequence
  synthetic sequence
ggagcaaagggaa

SEQ ID NO: 16613 - DNA, 13 bp, Artificial Sequence
  synthetic sequence
ctaatactggtgt

SEQ ID NO: 16614 - DNA, 13 bp, Artificial Sequence
  synthetic sequence
atcgcaggccgat

SEQ ID NO: 16615 - DNA, 13 bp, Artificial Sequence
  synthetic sequence
ttcagcgagaaac

SEQ ID NO: 16616 - DNA, 13 bp, Artificial Sequence
  synthetic sequence
gaatcgtaaatat

SEQ ID NO: 16617 - DNA, 13 bp, Artificial Sequence
  synthetic sequence
tttaccgtgtcac

SEQ ID NO: 16618 - DNA, 13 bp, Artificial Sequence
  synthetic sequence
gatcaacggcgtc

SEQ ID NO: 16619 - DNA, 13 bp, Artificial Sequence
  synthetic sequence
cacaggcctgctg

SEQ ID NO: 16620 - DNA, 13 bp, Artificial Sequence
  synthetic sequence
tattatcacgtgt

SEQ ID NO: 16621 - DNA, 13 bp, Artificial Sequence
  synthetic sequence
ggtagcaggctta

SEQ ID NO: 16622 - DNA, 13 bp, Artificial Sequence
  synthetic sequence
tgcgacgatcgga

SEQ ID NO: 16623 - DNA, 13 bp, Artificial Sequence
  synthetic sequence
atctcctatctgg

SEQ ID NO: 16624 - DNA, 13 bp, Artificial Sequence
  synthetic sequence
atagcgggcattg

SEQ ID NO: 16625 - DNA, 13 bp, Artificial Sequence
  synthetic sequence
ttgccagcactga

SEQ ID NO: 16626 - DNA, 13 bp, Artificial Sequence
  synthetic sequence
atgccattgcaaa

SEQ ID NO: 16627 - DNA, 13 bp, Artificial Sequence
  synthetic sequence
tgtctcacggatc

SEQ ID NO: 16628 - DNA, 13 bp, Artificial Sequence
  synthetic sequence
cccatcggaccct

SEQ ID NO: 16629 - DNA, 13 bp, Artificial Sequence
  synthetic sequence
gcgttaaggtttc

SEQ ID NO: 16630 - DNA, 13 bp, Artificial Sequence
  synthetic sequence
caatacgtgatgc

SEQ ID NO: 16631 - DNA, 13 bp, Artificial Sequence
  synthetic sequence
ctctgtcgtcact

SEQ ID NO: 16632 - DNA, 13 bp, Artificial Sequence
  synthetic sequence
gataggcatcgtt

SEQ ID NO: 16633 - DNA, 13 bp, Artificial Sequence
  synthetic sequence
ttcatatctcttc

SEQ ID NO: 16634 - DNA, 13 bp, Artificial Sequence
  synthetic sequence
atcaaacaggtgg

SEQ ID NO: 16635 - DNA, 13 bp, Artificial Sequence
  synthetic sequence
ggacgtggttccc

SEQ ID NO: 16636 - DNA, 13 bp, Artificial Sequence
  synthetic sequence
atttacttagtga

SEQ ID NO: 16637 - DNA, 13 bp, Artificial Sequence
  synthetic sequence
aggtcaaaagcct

SEQ ID NO: 16638 - DNA, 13 bp, Artificial Sequence
  synthetic sequence
gggcaaagagatg

SEQ ID NO: 16639 - DNA, 13 bp, Artificial Sequence
  synthetic sequence
gcctatccacgct

SEQ ID NO: 16640 - DNA, 13 bp, Artificial Sequence
  synthetic sequence
tcgggcttgtgtg

SEQ ID NO: 16641 - DNA, 13 bp, Artificial Sequence
  synthetic sequence
taaatacggtttc

SEQ ID NO: 16642 - DNA, 13 bp, Artificial Sequence
  synthetic sequence
gctcatggagcag

SEQ ID NO: 16643 - DNA, 13 bp, Artificial Sequence
  synthetic sequence
ccggtgaccagca

SEQ ID NO: 16644 - DNA, 13 bp, Artificial Sequence
  synthetic sequence
gtgccttgtcgct

SEQ ID NO: 16645 - DNA, 13 bp, Artificial Sequence
  synthetic sequence
gtcgcaggtgatc

SEQ ID NO: 16646 - DNA, 13 bp, Artificial Sequence
  synthetic sequence
tgctgctggtgga

SEQ ID NO: 16647 - DNA, 13 bp, Artificial Sequence
  synthetic sequence
tttaacgccaatg

SEQ ID NO: 16648 - DNA, 13 bp, Artificial Sequence
  synthetic sequence
ggatatagagaaa

SEQ ID NO: 16649 - DNA, 13 bp, Artificial Sequence
  synthetic sequence
ggttaccctgatc

SEQ ID NO: 16650 - DNA, 13 bp, Artificial Sequence
  synthetic sequence
ttggcacagagga

SEQ ID NO: 16651 - DNA, 13 bp, Artificial Sequence
  synthetic sequence
tttgcgggtcaag

SEQ ID NO: 16652 - DNA, 13 bp, Artificial Sequence
  synthetic sequence
ccattctaagtat

SEQ ID NO: 16653 - DNA, 13 bp, Artificial Sequence
  synthetic sequence
tcccatacagttt

SEQ ID NO: 16654 - DNA, 13 bp, Artificial Sequence
  synthetic sequence
cagcgctacctat

SEQ ID NO: 16655 - DNA, 13 bp, Artificial Sequence
  synthetic sequence
atgcctaatttct

SEQ ID NO: 16656 - DNA, 13 bp, Artificial Sequence
  synthetic sequence
taaagtgctaata

SEQ ID NO: 16657 - DNA, 13 bp, Artificial Sequence
  synthetic sequence
ctccgctttatct

SEQ ID NO: 16658 - DNA, 13 bp, Artificial Sequence
  synthetic sequence
gtgaaacggtaag

SEQ ID NO: 16659 - DNA, 13 bp, Artificial Sequence
  synthetic sequence
ccgccgtattcgt

SEQ ID NO: 16660 - DNA, 13 bp, Artificial Sequence
  synthetic sequence
atttcaaagagcg

SEQ ID NO: 16661 - DNA, 13 bp, Artificial Sequence
  synthetic sequence
ttagcggcagcat

SEQ ID NO: 16662 - DNA, 13 bp, Artificial Sequence
  synthetic sequence
cgttgacgcagcg

SEQ ID NO: 16663 - DNA, 13 bp, Artificial Sequence
  synthetic sequence
ggctcgctgtatg

SEQ ID NO: 16664 - DNA, 13 bp, Artificial Sequence
  synthetic sequence
tacatcctgtaat

SEQ ID NO: 16665 - DNA, 13 bp, Artificial Sequence
  synthetic sequence
cattgatggctgc

SEQ ID NO: 16666 - DNA, 13 bp, Artificial Sequence
  synthetic sequence
gcaacaaattcgt

SEQ ID NO: 16667 - DNA, 13 bp, Artificial Sequence
  synthetic sequence
tatagaatggaca

SEQ ID NO: 16668 - DNA, 13 bp, Artificial Sequence
  synthetic sequence
ttgatgctgctta

SEQ ID NO: 16669 - DNA, 13 bp, Artificial Sequence
  synthetic sequence
cagttaattggaa

SEQ ID NO: 16670 - DNA, 13 bp, Artificial Sequence
  synthetic sequence
ctgggcgagatcg

SEQ ID NO: 16671 - DNA, 13 bp, Artificial Sequence
  synthetic sequence
ttcttcatgaaat

SEQ ID NO: 16672 - DNA, 13 bp, Artificial Sequence
  synthetic sequence
ctggcgtcctgct

SEQ ID NO: 16673 - DNA, 13 bp, Artificial Sequence
  synthetic sequence
tattatcggtgaa

SEQ ID NO: 16674 - DNA, 13 bp, Artificial Sequence
  synthetic sequence
aaagcaaaacaag

SEQ ID NO: 16675 - DNA, 13 bp, Artificial Sequence
  synthetic sequence
agaacttgtgctg

SEQ ID NO: 16676 - DNA, 13 bp, Artificial Sequence
  synthetic sequence
tcagtatgattta

SEQ ID NO: 16677 - DNA, 13 bp, Artificial Sequence
  synthetic sequence
cccctgatgcgac

SEQ ID NO: 16678 - DNA, 13 bp, Artificial Sequence
  synthetic sequence
agcgacattggaa

SEQ ID NO: 16679 - DNA, 13 bp, Artificial Sequence
  synthetic sequence
gtacctataacca

SEQ ID NO: 16680 - DNA, 13 bp, Artificial Sequence
  synthetic sequence
agacagattgcca

SEQ ID NO: 16681 - DNA, 13 bp, Artificial Sequence
  synthetic sequence
gcgcatctggtca

SEQ ID NO: 16682 - DNA, 13 bp, Artificial Sequence
  synthetic sequence
ttgaatattccac

SEQ ID NO: 16683 - DNA, 13 bp, Artificial Sequence
  synthetic sequence
tgtgagctccaag

SEQ ID NO: 16684 - DNA, 13 bp, Artificial Sequence
  synthetic sequence
tacaatgtctcga

SEQ ID NO: 16685 - DNA, 13 bp, Artificial Sequence
  synthetic sequence
aggaggatatttc

SEQ ID NO: 16686 - DNA, 13 bp, Artificial Sequence
  synthetic sequence
gtgtgtaggaact

SEQ ID NO: 16687 - DNA, 13 bp, Artificial Sequence
  synthetic sequence
ggaagagaaactc

SEQ ID NO: 16688 - DNA, 13 bp, Artificial Sequence
  synthetic sequence
ctgaatctgatcc

SEQ ID NO: 16689 - DNA, 13 bp, Artificial Sequence
  synthetic sequence
atgagcgcgatcg

SEQ ID NO: 16690 - DNA, 13 bp, Artificial Sequence
  synthetic sequence
cgcatcgccaatg

SEQ ID NO: 16691 - DNA, 13 bp, Artificial Sequence
  synthetic sequence
aggatcttttccg

SEQ ID NO: 16692 - DNA, 13 bp, Artificial Sequence
  synthetic sequence
cctgctgatcgcc

SEQ ID NO: 16693 - DNA, 13 bp, Artificial Sequence
  synthetic sequence
tttaatgctgttt

SEQ ID NO: 16694 - DNA, 13 bp, Artificial Sequence
  synthetic sequence
gcagctttggatg

SEQ ID NO: 16695 - DNA, 13 bp, Artificial Sequence
  synthetic sequence
gcggaatggtcaa

SEQ ID NO: 16696 - DNA, 13 bp, Artificial Sequence
  synthetic sequence
gcggtggcctatg

SEQ ID NO: 16697 - DNA, 13 bp, Artificial Sequence
  synthetic sequence
ttcaaaacaagaa

SEQ ID NO: 16698 - DNA, 13 bp, Artificial Sequence
  synthetic sequence
gccagcgactgct

SEQ ID NO: 16699 - DNA, 13 bp, Artificial Sequence
  synthetic sequence
atccattggtcgt

SEQ ID NO: 16700 - DNA, 13 bp, Artificial Sequence
  synthetic sequence
ctggcaggaggaa

SEQ ID NO: 16701 - DNA, 13 bp, Artificial Sequence
  synthetic sequence
gctttgtgtttta

SEQ ID NO: 16702 - DNA, 13 bp, Artificial Sequence
  synthetic sequence
tgggtacgattct

SEQ ID NO: 16703 - DNA, 13 bp, Artificial Sequence
  synthetic sequence
tctgctggtatgg

SEQ ID NO: 16704 - DNA, 13 bp, Artificial Sequence
  synthetic sequence
taggtgtttctaa

SEQ ID NO: 16705 - DNA, 13 bp, Artificial Sequence
  synthetic sequence
cattgctcaatga

SEQ ID NO: 16706 - DNA, 13 bp, Artificial Sequence
  synthetic sequence
aacggaggcaatt

SEQ ID NO: 16707 - DNA, 13 bp, Artificial Sequence
  synthetic sequence
taagggcgatctg

SEQ ID NO: 16708 - DNA, 13 bp, Artificial Sequence
  synthetic sequence
tcggtttcctcac

SEQ ID NO: 16709 - DNA, 13 bp, Artificial Sequence
  synthetic sequence
tcatctggttaag

SEQ ID NO: 16710 - DNA, 13 bp, Artificial Sequence
  synthetic sequence
atccaaatatctg

SEQ ID NO: 16711 - DNA, 13 bp, Artificial Sequence
  synthetic sequence
tgaaaattggatg

SEQ ID NO: 16712 - DNA, 13 bp, Artificial Sequence
  synthetic sequence
gcagaacataccg

SEQ ID NO: 16713 - DNA, 13 bp, Artificial Sequence
  synthetic sequence
accgctacgacat

SEQ ID NO: 16714 - DNA, 13 bp, Artificial Sequence
  synthetic sequence
agccagaggcgca

SEQ ID NO: 16715 - DNA, 13 bp, Artificial Sequence
  synthetic sequence
cgggccagttcta

SEQ ID NO: 16716 - DNA, 13 bp, Artificial Sequence
  synthetic sequence
tgataccggatgt

SEQ ID NO: 16717 - DNA, 13 bp, Artificial Sequence
  synthetic sequence
ggaacgaaacgac

SEQ ID NO: 16718 - DNA, 13 bp, Artificial Sequence
  synthetic sequence
tcgttgggcacgt

SEQ ID NO: 16719 - DNA, 13 bp, Artificial Sequence
  synthetic sequence
tcagggaaacctt

SEQ ID NO: 16720 - DNA, 13 bp, Artificial Sequence
  synthetic sequence
ggcccagctgaaa

SEQ ID NO: 16721 - DNA, 13 bp, Artificial Sequence
  synthetic sequence
tcagtacgcattt

SEQ ID NO: 16722 - DNA, 13 bp, Artificial Sequence
  synthetic sequence
caacacgaacggc

SEQ ID NO: 16723 - DNA, 13 bp, Artificial Sequence
  synthetic sequence
agcctgtcttctg

SEQ ID NO: 16724 - DNA, 13 bp, Artificial Sequence
  synthetic sequence
ctgaatagcctaa

SEQ ID NO: 16725 - DNA, 13 bp, Artificial Sequence
  synthetic sequence
ttcccggccgaga

SEQ ID NO: 16726 - DNA, 13 bp, Artificial Sequence
  synthetic sequence
caccatcgcaaat

SEQ ID NO: 16727 - DNA, 13 bp, Artificial Sequence
  synthetic sequence
atgtctcccaccg

SEQ ID NO: 16728 - DNA, 13 bp, Artificial Sequence
  synthetic sequence
caggtgaggccgt

SEQ ID NO: 16729 - DNA, 13 bp, Artificial Sequence
  synthetic sequence
gtatgcaggccag

SEQ ID NO: 16730 - DNA, 13 bp, Artificial Sequence
  synthetic sequence
agaaagagcaacg

SEQ ID NO: 16731 - DNA, 13 bp, Artificial Sequence
  synthetic sequence
tcaaaagaaagaa

SEQ ID NO: 16732 - DNA, 13 bp, Artificial Sequence
  synthetic sequence
tacagaggtgtaa

SEQ ID NO: 16733 - DNA, 13 bp, Artificial Sequence
  synthetic sequence
tcagccattccac

SEQ ID NO: 16734 - DNA, 13 bp, Artificial Sequence
  synthetic sequence
ccctgtgcctaaa

SEQ ID NO: 16735 - DNA, 13 bp, Artificial Sequence
  synthetic sequence
gacgggatctatc

SEQ ID NO: 16736 - DNA, 13 bp, Artificial Sequence
  synthetic sequence
attatttgaagga

SEQ ID NO: 16737 - DNA, 13 bp, Artificial Sequence
  synthetic sequence
tggtgataacaac

SEQ ID NO: 16738 - DNA, 13 bp, Artificial Sequence
  synthetic sequence
acaccacatcaac

SEQ ID NO: 16739 - DNA, 13 bp, Artificial Sequence
  synthetic sequence
tcccgccttttgg

SEQ ID NO: 16740 - DNA, 13 bp, Artificial Sequence
  synthetic sequence
ggccgtcagtagt

SEQ ID NO: 16741 - DNA, 13 bp, Artificial Sequence
  synthetic sequence
gatgaagaagacg

SEQ ID NO: 16742 - DNA, 13 bp, Artificial Sequence
  synthetic sequence
acgcatccattct

SEQ ID NO: 16743 - DNA, 13 bp, Artificial Sequence
  synthetic sequence
cgtactcgcaccg

SEQ ID NO: 16744 - DNA, 13 bp, Artificial Sequence
  synthetic sequence
cagcggcaccttg

SEQ ID NO: 16745 - DNA, 13 bp, Artificial Sequence
  synthetic sequence
atatagcttccaa

SEQ ID NO: 16746 - DNA, 13 bp, Artificial Sequence
  synthetic sequence
gatgcgcgtatag

SEQ ID NO: 16747 - DNA, 13 bp, Artificial Sequence
  synthetic sequence
gggtttcggtgac

SEQ ID NO: 16748 - DNA, 13 bp, Artificial Sequence
  synthetic sequence
ctcatcgcagtat

SEQ ID NO: 16749 - DNA, 13 bp, Artificial Sequence
  synthetic sequence
ctgatcgccgcac

SEQ ID NO: 16750 - DNA, 13 bp, Artificial Sequence
  synthetic sequence
tcggggtgcacga

SEQ ID NO: 16751 - DNA, 13 bp, Artificial Sequence
  synthetic sequence
ggtgtggaaggca

SEQ ID NO: 16752 - DNA, 13 bp, Artificial Sequence
  synthetic sequence
cgattcgctgtat

SEQ ID NO: 16753 - DNA, 13 bp, Artificial Sequence
  synthetic sequence
gtatattgggtta

SEQ ID NO: 16754 - DNA, 13 bp, Artificial Sequence
  synthetic sequence
gcggcattggtcg

SEQ ID NO: 16755 - DNA, 13 bp, Artificial Sequence
  synthetic sequence
aggaacgaaaact

SEQ ID NO: 16756 - DNA, 13 bp, Artificial Sequence
  synthetic sequence
gcaccacaatcgc

SEQ ID NO: 16757 - DNA, 13 bp, Artificial Sequence
  synthetic sequence
ggtattgttgagg

SEQ ID NO: 16758 - DNA, 13 bp, Artificial Sequence
  synthetic sequence
tttagccagtata

SEQ ID NO: 16759 - DNA, 13 bp, Artificial Sequence
  synthetic sequence
ctgataccccatg

SEQ ID NO: 16760 - DNA, 13 bp, Artificial Sequence
  synthetic sequence
agacgttgcagga

SEQ ID NO: 16761 - DNA, 13 bp, Artificial Sequence
  synthetic sequence
aattggaagagaa

SEQ ID NO: 16762 - DNA, 13 bp, Artificial Sequence
  synthetic sequence
acaaaacgccgcc

SEQ ID NO: 16763 - DNA, 13 bp, Artificial Sequence
  synthetic sequence
cgccgttggcatt

SEQ ID NO: 16764 - DNA, 13 bp, Artificial Sequence
  synthetic sequence
tcttgctcgaggc

SEQ ID NO: 16765 - DNA, 13 bp, Artificial Sequence
  synthetic sequence
tggccagcgcatc

SEQ ID NO: 16766 - DNA, 13 bp, Artificial Sequence
  synthetic sequence
ggcgatggaacag

SEQ ID NO: 16767 - DNA, 13 bp, Artificial Sequence
  synthetic sequence
gtagcaaagtgaa

SEQ ID NO: 16768 - DNA, 13 bp, Artificial Sequence
  synthetic sequence
tcgattcggtgct

SEQ ID NO: 16769 - DNA, 13 bp, Artificial Sequence
  synthetic sequence
ttagtaagacgtt

SEQ ID NO: 16770 - DNA, 13 bp, Artificial Sequence
  synthetic sequence
ctcgctggacacg

SEQ ID NO: 16771 - DNA, 13 bp, Artificial Sequence
  synthetic sequence
gcttatttgctct

SEQ ID NO: 16772 - DNA, 13 bp, Artificial Sequence
  synthetic sequence
catctctgtaata

SEQ ID NO: 16773 - DNA, 13 bp, Artificial Sequence
  synthetic sequence
gggaatggatttt

SEQ ID NO: 16774 - DNA, 13 bp, Artificial Sequence
  synthetic sequence
cagaccgtggaaa

SEQ ID NO: 16775 - DNA, 13 bp, Artificial Sequence
  synthetic sequence
caatctgtgcagt

SEQ ID NO: 16776 - DNA, 13 bp, Artificial Sequence
  synthetic sequence
cattattttgatg

SEQ ID NO: 16777 - DNA, 13 bp, Artificial Sequence
  synthetic sequence
gaaatctggccac

SEQ ID NO: 16778 - DNA, 13 bp, Artificial Sequence
  synthetic sequence
tacgacacagcgc

SEQ ID NO: 16779 - DNA, 13 bp, Artificial Sequence
  synthetic sequence
cctaatgtgcttg

SEQ ID NO: 16780 - DNA, 13 bp, Artificial Sequence
  synthetic sequence
tcattccgaatgg

SEQ ID NO: 16781 - DNA, 13 bp, Artificial Sequence
  synthetic sequence
ggcctgttcgcga

SEQ ID NO: 16782 - DNA, 13 bp, Artificial Sequence
  synthetic sequence
ccaatcatcgtta

SEQ ID NO: 16783 - DNA, 13 bp, Artificial Sequence
  synthetic sequence
gccaatgaaaccg

SEQ ID NO: 16784 - DNA, 13 bp, Artificial Sequence
  synthetic sequence
gaatagtgataaa

SEQ ID NO: 16785 - DNA, 13 bp, Artificial Sequence
  synthetic sequence
ggatccatccaaa

SEQ ID NO: 16786 - DNA, 13 bp, Artificial Sequence
  synthetic sequence
gctggtggaagcg

SEQ ID NO: 16787 - DNA, 13 bp, Artificial Sequence
  synthetic sequence
tatccgcttcgac

SEQ ID NO: 16788 - DNA, 13 bp, Artificial Sequence
  synthetic sequence
tttatcacactgc

SEQ ID NO: 16789 - DNA, 13 bp, Artificial Sequence
  synthetic sequence
accatttgtttgg

SEQ ID NO: 16790 - DNA, 13 bp, Artificial Sequence
  synthetic sequence
gatactgctcgtg

SEQ ID NO: 16791 - DNA, 13 bp, Artificial Sequence
  synthetic sequence
ccatcattctcac

SEQ ID NO: 16792 - DNA, 13 bp, Artificial Sequence
  synthetic sequence
ttgctgatgaaaa

SEQ ID NO: 16793 - DNA, 13 bp, Artificial Sequence
  synthetic sequence
gtgaaaccctcag

SEQ ID NO: 16794 - DNA, 13 bp, Artificial Sequence
  synthetic sequence
tcatagtggaacc

SEQ ID NO: 16795 - DNA, 13 bp, Artificial Sequence
  synthetic sequence
gcgaggatcggta

SEQ ID NO: 16796 - DNA, 13 bp, Artificial Sequence
  synthetic sequence
gacgcctcgtcct

SEQ ID NO: 16797 - DNA, 13 bp, Artificial Sequence
  synthetic sequence
gagaggcggtttg

SEQ ID NO: 16798 - DNA, 13 bp, Artificial Sequence
  synthetic sequence
aatacccggaagt

SEQ ID NO: 16799 - DNA, 13 bp, Artificial Sequence
  synthetic sequence
tgcaattcttgaa

SEQ ID NO: 16800 - DNA, 13 bp, Artificial Sequence
  synthetic sequence
aattcgcggcgta

SEQ ID NO: 16801 - DNA, 13 bp, Artificial Sequence
  synthetic sequence
atttcatgtgtgg

SEQ ID NO: 16802 - DNA, 13 bp, Artificial Sequence
  synthetic sequence
aaacaatcctgca

SEQ ID NO: 16803 - DNA, 13 bp, Artificial Sequence
  synthetic sequence
tactgcacccaaa

SEQ ID NO: 16804 - DNA, 13 bp, Artificial Sequence
  synthetic sequence
acagcggcatcgt

SEQ ID NO: 16805 - DNA, 13 bp, Artificial Sequence
  synthetic sequence
gaataaacccgct

SEQ ID NO: 16806 - DNA, 13 bp, Artificial Sequence
  synthetic sequence
gcagttctcaaca

SEQ ID NO: 16807 - DNA, 13 bp, Artificial Sequence
  synthetic sequence
caggtaacgcata

SEQ ID NO: 16808 - DNA, 13 bp, Artificial Sequence
  synthetic sequence
gcagaatgttttc

SEQ ID NO: 16809 - DNA, 13 bp, Artificial Sequence
  synthetic sequence
cgggcattgatga

SEQ ID NO: 16810 - DNA, 13 bp, Artificial Sequence
  synthetic sequence
gctgttggtatca

SEQ ID NO: 16811 - DNA, 13 bp, Artificial Sequence
  synthetic sequence
acgctgtttggca

SEQ ID NO: 16812 - DNA, 13 bp, Artificial Sequence
  synthetic sequence
gactgcgtcacgt

SEQ ID NO: 16813 - DNA, 13 bp, Artificial Sequence
  synthetic sequence
atgatgactctgg

SEQ ID NO: 16814 - DNA, 13 bp, Artificial Sequence
  synthetic sequence
gcaaaagcagtcg

SEQ ID NO: 16815 - DNA, 13 bp, Artificial Sequence
  synthetic sequence
ccctgttagccac

SEQ ID NO: 16816 - DNA, 13 bp, Artificial Sequence
  synthetic sequence
cttgtcgaggatg

SEQ ID NO: 16817 - DNA, 13 bp, Artificial Sequence
  synthetic sequence
aggtaaaaccaat

SEQ ID NO: 16818 - DNA, 13 bp, Artificial Sequence
  synthetic sequence
ctgtcgatcgcgc

SEQ ID NO: 16819 - DNA, 13 bp, Artificial Sequence
  synthetic sequence
aattcttttcgta

SEQ ID NO: 16820 - DNA, 13 bp, Artificial Sequence
  synthetic sequence
cctctttagaagg

SEQ ID NO: 16821 - DNA, 13 bp, Artificial Sequence
  synthetic sequence
tcggtcctcgcaa

SEQ ID NO: 16822 - DNA, 13 bp, Artificial Sequence
  synthetic sequence
cgaaggtcagtgc

SEQ ID NO: 16823 - DNA, 13 bp, Artificial Sequence
  synthetic sequence
cagttgatcgcaa

SEQ ID NO: 16824 - DNA, 13 bp, Artificial Sequence
  synthetic sequence
gcggctcttcagc

SEQ ID NO: 16825 - DNA, 13 bp, Artificial Sequence
  synthetic sequence
gcgacgcagggta

SEQ ID NO: 16826 - DNA, 13 bp, Artificial Sequence
  synthetic sequence
gcagttccttcga

SEQ ID NO: 16827 - DNA, 13 bp, Artificial Sequence
  synthetic sequence
ccatttgcgataa

SEQ ID NO: 16828 - DNA, 13 bp, Artificial Sequence
  synthetic sequence
tttaccagaattg

SEQ ID NO: 16829 - DNA, 13 bp, Artificial Sequence
  synthetic sequence
cagcagatagcag

SEQ ID NO: 16830 - DNA, 13 bp, Artificial Sequence
  synthetic sequence
tcgtcggtctcgg

SEQ ID NO: 16831 - DNA, 13 bp, Artificial Sequence
  synthetic sequence
tttcatgatcagt

SEQ ID NO: 16832 - DNA, 13 bp, Artificial Sequence
  synthetic sequence
ttgaggcaaattc

SEQ ID NO: 16833 - DNA, 13 bp, Artificial Sequence
  synthetic sequence
gtctttattcgta

SEQ ID NO: 16834 - DNA, 13 bp, Artificial Sequence
  synthetic sequence
agctcgacctata

SEQ ID NO: 16835 - DNA, 13 bp, Artificial Sequence
  synthetic sequence
tgcatgtcctgct

SEQ ID NO: 16836 - DNA, 13 bp, Artificial Sequence
  synthetic sequence
accgtggaccacc

SEQ ID NO: 16837 - DNA, 13 bp, Artificial Sequence
  synthetic sequence
tctgtgccattta

SEQ ID NO: 16838 - DNA, 13 bp, Artificial Sequence
  synthetic sequence
cacgaggggaaaa

SEQ ID NO: 16839 - DNA, 13 bp, Artificial Sequence
  synthetic sequence
aaaatgaaatacc

SEQ ID NO: 16840 - DNA, 13 bp, Artificial Sequence
  synthetic sequence
tccttgaagaaga

SEQ ID NO: 16841 - DNA, 13 bp, Artificial Sequence
  synthetic sequence
gccctgctttatc

SEQ ID NO: 16842 - DNA, 13 bp, Artificial Sequence
  synthetic sequence
gaaacgcaaagat

SEQ ID NO: 16843 - DNA, 13 bp, Artificial Sequence
  synthetic sequence
cttcagcttcaag

SEQ ID NO: 16844 - DNA, 13 bp, Artificial Sequence
  synthetic sequence
tttgaagcgataa

SEQ ID NO: 16845 - DNA, 13 bp, Artificial Sequence
  synthetic sequence
cttcctatgttac

SEQ ID NO: 16846 - DNA, 13 bp, Artificial Sequence
  synthetic sequence
tgcccgactgttg

SEQ ID NO: 16847 - DNA, 13 bp, Artificial Sequence
  synthetic sequence
aggggaccatctc

SEQ ID NO: 16848 - DNA, 13 bp, Artificial Sequence
  synthetic sequence
ctcctcgcagtaa

SEQ ID NO: 16849 - DNA, 13 bp, Artificial Sequence
  synthetic sequence
gctctttagggaa

SEQ ID NO: 16850 - DNA, 13 bp, Artificial Sequence
  synthetic sequence
ttgccttaacatt

SEQ ID NO: 16851 - DNA, 13 bp, Artificial Sequence
  synthetic sequence
tactcttgaatac

SEQ ID NO: 16852 - DNA, 13 bp, Artificial Sequence
  synthetic sequence
cgggtatattcaa

SEQ ID NO: 16853 - DNA, 13 bp, Artificial Sequence
  synthetic sequence
gacacggtgacac

SEQ ID NO: 16854 - DNA, 13 bp, Artificial Sequence
  synthetic sequence
tcattaaggtttt

SEQ ID NO: 16855 - DNA, 13 bp, Artificial Sequence
  synthetic sequence
taacaaatagaca

SEQ ID NO: 16856 - DNA, 13 bp, Artificial Sequence
  synthetic sequence
agtccgaccaact

SEQ ID NO: 16857 - DNA, 13 bp, Artificial Sequence
  synthetic sequence
taatctccgtgcg

SEQ ID NO: 16858 - DNA, 13 bp, Artificial Sequence
  synthetic sequence
gggcaggttagtg

SEQ ID NO: 16859 - DNA, 13 bp, Artificial Sequence
  synthetic sequence
cctctaaagcaat

SEQ ID NO: 16860 - DNA, 13 bp, Artificial Sequence
  synthetic sequence
agttgtcacactg

SEQ ID NO: 16861 - DNA, 13 bp, Artificial Sequence
  synthetic sequence
gttctatctccac

SEQ ID NO: 16862 - DNA, 13 bp, Artificial Sequence
  synthetic sequence
tgcgacaccgcca

SEQ ID NO: 16863 - DNA, 13 bp, Artificial Sequence
  synthetic sequence
cgaaatcacccgt

SEQ ID NO: 16864 - DNA, 13 bp, Artificial Sequence
  synthetic sequence
tggcgtaatcggt

SEQ ID NO: 16865 - DNA, 13 bp, Artificial Sequence
  synthetic sequence
ctgccactcgtcg

SEQ ID NO: 16866 - DNA, 13 bp, Artificial Sequence
  synthetic sequence
cggtgtcatgggc

SEQ ID NO: 16867 - DNA, 13 bp, Artificial Sequence
  synthetic sequence
tcgcattcttcgc

SEQ ID NO: 16868 - DNA, 13 bp, Artificial Sequence
  synthetic sequence
gttttgccgctct

SEQ ID NO: 16869 - DNA, 13 bp, Artificial Sequence
  synthetic sequence
gcacatacatacc

SEQ ID NO: 16870 - DNA, 13 bp, Artificial Sequence
  synthetic sequence
tatattctcatcg

SEQ ID NO: 16871 - DNA, 13 bp, Artificial Sequence
  synthetic sequence
ggcactacgaatg

SEQ ID NO: 16872 - DNA, 13 bp, Artificial Sequence
  synthetic sequence
cgcaccgttggga

SEQ ID NO: 16873 - DNA, 13 bp, Artificial Sequence
  synthetic sequence
gccttcaccctgg

SEQ ID NO: 16874 - DNA, 13 bp, Artificial Sequence
  synthetic sequence
ttcgcccaccatg

SEQ ID NO: 16875 - DNA, 13 bp, Artificial Sequence
  synthetic sequence
tgttattctgcgg

SEQ ID NO: 16876 - DNA, 13 bp, Artificial Sequence
  synthetic sequence
gaggccacaacag

SEQ ID NO: 16877 - DNA, 13 bp, Artificial Sequence
  synthetic sequence
tgattttcgctgt

SEQ ID NO: 16878 - DNA, 13 bp, Artificial Sequence
  synthetic sequence
acaattgccagta

SEQ ID NO: 16879 - DNA, 13 bp, Artificial Sequence
  synthetic sequence
tttatctgtatga

SEQ ID NO: 16880 - DNA, 13 bp, Artificial Sequence
  synthetic sequence
acggcgtatggaa

SEQ ID NO: 16881 - DNA, 13 bp, Artificial Sequence
  synthetic sequence
gagcgggaacacg

SEQ ID NO: 16882 - DNA, 13 bp, Artificial Sequence
  synthetic sequence
catcctattcaca

SEQ ID NO: 16883 - DNA, 13 bp, Artificial Sequence
  synthetic sequence
taaccacacgacg

SEQ ID NO: 16884 - DNA, 13 bp, Artificial Sequence
  synthetic sequence
ccgacctgaccaa

SEQ ID NO: 16885 - DNA, 13 bp, Artificial Sequence
  synthetic sequence
agaccaccatcaa

SEQ ID NO: 16886 - DNA, 13 bp, Artificial Sequence
  synthetic sequence
tctgctccatcaa

SEQ ID NO: 16887 - DNA, 13 bp, Artificial Sequence
  synthetic sequence
aacgaaacataat

SEQ ID NO: 16888 - DNA, 13 bp, Artificial Sequence
  synthetic sequence
atgcacggcacgc

SEQ ID NO: 16889 - DNA, 13 bp, Artificial Sequence
  synthetic sequence
taattcttgcatt

SEQ ID NO: 16890 - DNA, 13 bp, Artificial Sequence
  synthetic sequence
cagctgtttatcg

SEQ ID NO: 16891 - DNA, 13 bp, Artificial Sequence
  synthetic sequence
atcaccacaattt

SEQ ID NO: 16892 - DNA, 13 bp, Artificial Sequence
  synthetic sequence
gcaccattaagat

SEQ ID NO: 16893 - DNA, 13 bp, Artificial Sequence
  synthetic sequence
cggccagaactcc

SEQ ID NO: 16894 - DNA, 13 bp, Artificial Sequence
  synthetic sequence
gacgtccgtcgtc

SEQ ID NO: 16895 - DNA, 13 bp, Artificial Sequence
  synthetic sequence
agataagctaacc

SEQ ID NO: 16896 - DNA, 13 bp, Artificial Sequence
  synthetic sequence
tcattgctcacga

SEQ ID NO: 16897 - DNA, 13 bp, Artificial Sequence
  synthetic sequence
taattttgttacg

SEQ ID NO: 16898 - DNA, 13 bp, Artificial Sequence
  synthetic sequence
cagagcatctact

SEQ ID NO: 16899 - DNA, 13 bp, Artificial Sequence
  synthetic sequence
cggcattttgaaa

SEQ ID NO: 16900 - DNA, 13 bp, Artificial Sequence
  synthetic sequence
atcagggagacga

SEQ ID NO: 16901 - DNA, 13 bp, Artificial Sequence
  synthetic sequence
agctctgcactag

SEQ ID NO: 16902 - DNA, 13 bp, Artificial Sequence
  synthetic sequence
gttccgggctttg

SEQ ID NO: 16903 - DNA, 13 bp, Artificial Sequence
  synthetic sequence
atagcaatatggg

SEQ ID NO: 16904 - DNA, 13 bp, Artificial Sequence
  synthetic sequence
caggtcgatgtcg

SEQ ID NO: 16905 - DNA, 13 bp, Artificial Sequence
  synthetic sequence
ttatcttcggcgg

SEQ ID NO: 16906 - DNA, 13 bp, Artificial Sequence
  synthetic sequence
aataagtgttttc

SEQ ID NO: 16907 - DNA, 13 bp, Artificial Sequence
  synthetic sequence
cgccttgagcgtc

SEQ ID NO: 16908 - DNA, 13 bp, Artificial Sequence
  synthetic sequence
ggattggcaaatt

SEQ ID NO: 16909 - DNA, 13 bp, Artificial Sequence
  synthetic sequence
tcgcaccgtacga

SEQ ID NO: 16910 - DNA, 13 bp, Artificial Sequence
  synthetic sequence
gctgtcttgtgcg

SEQ ID NO: 16911 - DNA, 13 bp, Artificial Sequence
  synthetic sequence
tcgccaacggcag

SEQ ID NO: 16912 - DNA, 13 bp, Artificial Sequence
  synthetic sequence
aaacctgctacaa

SEQ ID NO: 16913 - DNA, 13 bp, Artificial Sequence
  synthetic sequence
cgaagcgctcgtc

SEQ ID NO: 16914 - DNA, 13 bp, Artificial Sequence
  synthetic sequence
acggtaagtcccg

SEQ ID NO: 16915 - DNA, 13 bp, Artificial Sequence
  synthetic sequence
aaggtgtcgtggg

SEQ ID NO: 16916 - DNA, 13 bp, Artificial Sequence
  synthetic sequence
tggaaggataatc

SEQ ID NO: 16917 - DNA, 13 bp, Artificial Sequence
  synthetic sequence
ccgatcatcgaca

SEQ ID NO: 16918 - DNA, 13 bp, Artificial Sequence
  synthetic sequence
tgatctccccatt

SEQ ID NO: 16919 - DNA, 13 bp, Artificial Sequence
  synthetic sequence
gttggcgcaaaat

SEQ ID NO: 16920 - DNA, 13 bp, Artificial Sequence
  synthetic sequence
tattctgaagatt

SEQ ID NO: 16921 - DNA, 13 bp, Artificial Sequence
  synthetic sequence
tgctcgaccagcc

SEQ ID NO: 16922 - DNA, 13 bp, Artificial Sequence
  synthetic sequence
gaaaagcttagtg

SEQ ID NO: 16923 - DNA, 13 bp, Artificial Sequence
  synthetic sequence
ctgctggtcgaac

SEQ ID NO: 16924 - DNA, 13 bp, Artificial Sequence
  synthetic sequence
tcttggatcaatg

SEQ ID NO: 16925 - DNA, 13 bp, Artificial Sequence
  synthetic sequence
gcctcgacccgat

SEQ ID NO: 16926 - DNA, 13 bp, Artificial Sequence
  synthetic sequence
cacctccctgaaa

SEQ ID NO: 16927 - DNA, 13 bp, Artificial Sequence
  synthetic sequence
gatgtttatacaa

SEQ ID NO: 16928 - DNA, 13 bp, Artificial Sequence
  synthetic sequence
gaatctgttagct

SEQ ID NO: 16929 - DNA, 13 bp, Artificial Sequence
  synthetic sequence
ctgatttaatgcg

SEQ ID NO: 16930 - DNA, 13 bp, Artificial Sequence
  synthetic sequence
tacggtgaccagg

SEQ ID NO: 16931 - DNA, 13 bp, Artificial Sequence
  synthetic sequence
tagcaccgcgacc

SEQ ID NO: 16932 - DNA, 13 bp, Artificial Sequence
  synthetic sequence
gttaaatatccct

SEQ ID NO: 16933 - DNA, 13 bp, Artificial Sequence
  synthetic sequence
atatttggaacag

SEQ ID NO: 16934 - DNA, 13 bp, Artificial Sequence
  synthetic sequence
tttggctgaagca

SEQ ID NO: 16935 - DNA, 13 bp, Artificial Sequence
  synthetic sequence
atttgcaacagta

SEQ ID NO: 16936 - DNA, 13 bp, Artificial Sequence
  synthetic sequence
ttccgtcacgttc

SEQ ID NO: 16937 - DNA, 13 bp, Artificial Sequence
  synthetic sequence
gcggcgtcaacct

SEQ ID NO: 16938 - DNA, 13 bp, Artificial Sequence
  synthetic sequence
tgcttatggcttt

SEQ ID NO: 16939 - DNA, 13 bp, Artificial Sequence
  synthetic sequence
acacaagaacagc

SEQ ID NO: 16940 - DNA, 13 bp, Artificial Sequence
  synthetic sequence
ccggggaaggctt

SEQ ID NO: 16941 - DNA, 13 bp, Artificial Sequence
  synthetic sequence
cgttttcgcgctg

SEQ ID NO: 16942 - DNA, 13 bp, Artificial Sequence
  synthetic sequence
ccttattcccttt

SEQ ID NO: 16943 - DNA, 13 bp, Artificial Sequence
  synthetic sequence
aatagtaatggct

SEQ ID NO: 16944 - DNA, 13 bp, Artificial Sequence
  synthetic sequence
agattccgcagag

SEQ ID NO: 16945 - DNA, 13 bp, Artificial Sequence
  synthetic sequence
acgggcgtattgt

SEQ ID NO: 16946 - DNA, 13 bp, Artificial Sequence
  synthetic sequence
taccatttcatat

SEQ ID NO: 16947 - DNA, 13 bp, Artificial Sequence
  synthetic sequence
ctggttttacttt

SEQ ID NO: 16948 - DNA, 13 bp, Artificial Sequence
  synthetic sequence
atgaggaactgcc

SEQ ID NO: 16949 - DNA, 13 bp, Artificial Sequence
  synthetic sequence
gctgccgcaattg

SEQ ID NO: 16950 - DNA, 13 bp, Artificial Sequence
  synthetic sequence
caccctccatgtg

SEQ ID NO: 16951 - DNA, 13 bp, Artificial Sequence
  synthetic sequence
gcccttctttaca

SEQ ID NO: 16952 - DNA, 13 bp, Artificial Sequence
  synthetic sequence
cactattttaatc

SEQ ID NO: 16953 - DNA, 13 bp, Artificial Sequence
  synthetic sequence
cccgtggagttcc

SEQ ID NO: 16954 - DNA, 13 bp, Artificial Sequence
  synthetic sequence
aggtgttagctga

SEQ ID NO: 16955 - DNA, 13 bp, Artificial Sequence
  synthetic sequence
aaatgatgaaaca

SEQ ID NO: 16956 - DNA, 13 bp, Artificial Sequence
  synthetic sequence
tgccgacggtgac

SEQ ID NO: 16957 - DNA, 13 bp, Artificial Sequence
  synthetic sequence
gtctcagcggaag

SEQ ID NO: 16958 - DNA, 13 bp, Artificial Sequence
  synthetic sequence
accatatcagtgc

SEQ ID NO: 16959 - DNA, 13 bp, Artificial Sequence
  synthetic sequence
cgcgatcgattcc

SEQ ID NO: 16960 - DNA, 13 bp, Artificial Sequence
  synthetic sequence
ctagtaggtcgca

SEQ ID NO: 16961 - DNA, 13 bp, Artificial Sequence
  synthetic sequence
agatgtgcaggcg

SEQ ID NO: 16962 - DNA, 13 bp, Artificial Sequence
  synthetic sequence
tcctcctctgcca

SEQ ID NO: 16963 - DNA, 13 bp, Artificial Sequence
  synthetic sequence
gtctattatgctt

SEQ ID NO: 16964 - DNA, 13 bp, Artificial Sequence
  synthetic sequence
ttttctgataacg

SEQ ID NO: 16965 - DNA, 13 bp, Artificial Sequence
  synthetic sequence
taccaaagagcta

SEQ ID NO: 16966 - DNA, 13 bp, Artificial Sequence
  synthetic sequence
caatgagttccga

SEQ ID NO: 16967 - DNA, 13 bp, Artificial Sequence
  synthetic sequence
gagaatatttgat

SEQ ID NO: 16968 - DNA, 13 bp, Artificial Sequence
  synthetic sequence
gcccgatttctat

SEQ ID NO: 16969 - DNA, 13 bp, Artificial Sequence
  synthetic sequence
taccaaatcaagc

SEQ ID NO: 16970 - DNA, 13 bp, Artificial Sequence
  synthetic sequence
tatatcatcgaaa

SEQ ID NO: 16971 - DNA, 13 bp, Artificial Sequence
  synthetic sequence
aaacgggtaaggg

SEQ ID NO: 16972 - DNA, 13 bp, Artificial Sequence
  synthetic sequence
gggcagccagtac

SEQ ID NO: 16973 - DNA, 13 bp, Artificial Sequence
  synthetic sequence
tatggcaaagtag

SEQ ID NO: 16974 - DNA, 13 bp, Artificial Sequence
  synthetic sequence
gctaggctgcttt

SEQ ID NO: 16975 - DNA, 13 bp, Artificial Sequence
  synthetic sequence
gcaggaagctgac

SEQ ID NO: 16976 - DNA, 13 bp, Artificial Sequence
  synthetic sequence
gcattcgtcatgg

SEQ ID NO: 16977 - DNA, 13 bp, Artificial Sequence
  synthetic sequence
taaaataaaggcg

SEQ ID NO: 16978 - DNA, 13 bp, Artificial Sequence
  synthetic sequence
tttgacagctgtt

SEQ ID NO: 16979 - DNA, 13 bp, Artificial Sequence
  synthetic sequence
tgacggaagattt

SEQ ID NO: 16980 - DNA, 13 bp, Artificial Sequence
  synthetic sequence
tagttcatgtaga

SEQ ID NO: 16981 - DNA, 13 bp, Artificial Sequence
  synthetic sequence
gtcagcttgtagt

SEQ ID NO: 16982 - DNA, 13 bp, Artificial Sequence
  synthetic sequence
ggttttagccgta

SEQ ID NO: 16983 - DNA, 13 bp, Artificial Sequence
  synthetic sequence
aacccaagagatg

SEQ ID NO: 16984 - DNA, 13 bp, Artificial Sequence
  synthetic sequence
ttttcatcttcac

SEQ ID NO: 16985 - DNA, 13 bp, Artificial Sequence
  synthetic sequence
tatcaggccagct

SEQ ID NO: 16986 - DNA, 13 bp, Artificial Sequence
  synthetic sequence
aataagttctgga

SEQ ID NO: 16987 - DNA, 13 bp, Artificial Sequence
  synthetic sequence
gccattcgacgcg

SEQ ID NO: 16988 - DNA, 13 bp, Artificial Sequence
  synthetic sequence
gtggtgaacttaa

SEQ ID NO: 16989 - DNA, 13 bp, Artificial Sequence
  synthetic sequence
tcgcagggaacac

SEQ ID NO: 16990 - DNA, 13 bp, Artificial Sequence
  synthetic sequence
atttggtaggtgc

SEQ ID NO: 16991 - DNA, 13 bp, Artificial Sequence
  synthetic sequence
caggttgccatcc

SEQ ID NO: 16992 - DNA, 13 bp, Artificial Sequence
  synthetic sequence
ctcgtgcaacatg

SEQ ID NO: 16993 - DNA, 13 bp, Artificial Sequence
  synthetic sequence
cgatctgccgaac

SEQ ID NO: 16994 - DNA, 13 bp, Artificial Sequence
  synthetic sequence
tctccaactatcc

SEQ ID NO: 16995 - DNA, 13 bp, Artificial Sequence
  synthetic sequence
acgcaagattctt

SEQ ID NO: 16996 - DNA, 13 bp, Artificial Sequence
  synthetic sequence
tgcagtgttaatg

SEQ ID NO: 16997 - DNA, 13 bp, Artificial Sequence
  synthetic sequence
gtaaacgtcattt

SEQ ID NO: 16998 - DNA, 13 bp, Artificial Sequence
  synthetic sequence
cttttgaaagtac

SEQ ID NO: 16999 - DNA, 13 bp, Artificial Sequence
  synthetic sequence
tggtgtaaagaaa

SEQ ID NO: 17000 - DNA, 13 bp, Artificial Sequence
  synthetic sequence
gtttcgccattag

SEQ ID NO: 17001 - DNA, 13 bp, Artificial Sequence
  synthetic sequence
atcatgcttaatg

SEQ ID NO: 17002 - DNA, 13 bp, Artificial Sequence
  synthetic sequence
tcatgaagtcgcc

SEQ ID NO: 17003 - DNA, 13 bp, Artificial Sequence
  synthetic sequence
aaatctcctcatc

SEQ ID NO: 17004 - DNA, 13 bp, Artificial Sequence
  synthetic sequence
ttgatgatgccat

SEQ ID NO: 17005 - DNA, 13 bp, Artificial Sequence
  synthetic sequence
ctcttggcggttt

SEQ ID NO: 17006 - DNA, 13 bp, Artificial Sequence
  synthetic sequence
tccatgccggaag

SEQ ID NO: 17007 - DNA, 13 bp, Artificial Sequence
  synthetic sequence
ctgcaccagtgca

SEQ ID NO: 17008 - DNA, 13 bp, Artificial Sequence
  synthetic sequence
tgagtttccatga

SEQ ID NO: 17009 - DNA, 13 bp, Artificial Sequence
  synthetic sequence
tccaattcgtctg

SEQ ID NO: 17010 - DNA, 13 bp, Artificial Sequence
  synthetic sequence
tccaggcgacttc

SEQ ID NO: 17011 - DNA, 13 bp, Artificial Sequence
  synthetic sequence
tctatagtagctg

SEQ ID NO: 17012 - DNA, 13 bp, Artificial Sequence
  synthetic sequence
ttgaccagcgcgc

SEQ ID NO: 17013 - DNA, 13 bp, Artificial Sequence
  synthetic sequence
atcatgagccagt

SEQ ID NO: 17014 - DNA, 13 bp, Artificial Sequence
  synthetic sequence
ttgcgaaatattt

SEQ ID NO: 17015 - DNA, 13 bp, Artificial Sequence
  synthetic sequence
tacgaatgggcac

SEQ ID NO: 17016 - DNA, 13 bp, Artificial Sequence
  synthetic sequence
gatcgagcgatgc

SEQ ID NO: 17017 - DNA, 13 bp, Artificial Sequence
  synthetic sequence
cgctggcgtcaga

SEQ ID NO: 17018 - DNA, 13 bp, Artificial Sequence
  synthetic sequence
caggctttaaacg

SEQ ID NO: 17019 - DNA, 13 bp, Artificial Sequence
  synthetic sequence
tggcttttctgcc

SEQ ID NO: 17020 - DNA, 13 bp, Artificial Sequence
  synthetic sequence
tttacgagtggac

SEQ ID NO: 17021 - DNA, 13 bp, Artificial Sequence
  synthetic sequence
ataaaacggcagg

SEQ ID NO: 17022 - DNA, 13 bp, Artificial Sequence
  synthetic sequence
gaacttgccctgg

SEQ ID NO: 17023 - DNA, 13 bp, Artificial Sequence
  synthetic sequence
gtgatgcgatatc

SEQ ID NO: 17024 - DNA, 13 bp, Artificial Sequence
  synthetic sequence
gacaaatcaactc

SEQ ID NO: 17025 - DNA, 13 bp, Artificial Sequence
  synthetic sequence
ttgctgccacctt

SEQ ID NO: 17026 - DNA, 13 bp, Artificial Sequence
  synthetic sequence
gttcttcgccccg

SEQ ID NO: 17027 - DNA, 13 bp, Artificial Sequence
  synthetic sequence
gggatcaacgcgc

SEQ ID NO: 17028 - DNA, 13 bp, Artificial Sequence
  synthetic sequence
caggccgcttgtc

SEQ ID NO: 17029 - DNA, 13 bp, Artificial Sequence
  synthetic sequence
cttggctactggt

SEQ ID NO: 17030 - DNA, 13 bp, Artificial Sequence
  synthetic sequence
gttgttcttacgt

SEQ ID NO: 17031 - DNA, 13 bp, Artificial Sequence
  synthetic sequence
ccaaatgaaattt

SEQ ID NO: 17032 - DNA, 13 bp, Artificial Sequence
  synthetic sequence
tgtacttgtattg

SEQ ID NO: 17033 - DNA, 13 bp, Artificial Sequence
  synthetic sequence
tcttcgagacgcg

SEQ ID NO: 17034 - DNA, 13 bp, Artificial Sequence
  synthetic sequence
tacatggtgtcga

SEQ ID NO: 17035 - DNA, 13 bp, Artificial Sequence
  synthetic sequence
catttgtaccacc

SEQ ID NO: 17036 - DNA, 13 bp, Artificial Sequence
  synthetic sequence
agtggcaacgcca

SEQ ID NO: 17037 - DNA, 13 bp, Artificial Sequence
  synthetic sequence
gaaccaggcgcac

SEQ ID NO: 17038 - DNA, 13 bp, Artificial Sequence
  synthetic sequence
tttatgggataga

SEQ ID NO: 17039 - DNA, 13 bp, Artificial Sequence
  synthetic sequence
gttgcagcctcaa

SEQ ID NO: 17040 - DNA, 13 bp, Artificial Sequence
  synthetic sequence
taattgcgagccc

SEQ ID NO: 17041 - DNA, 13 bp, Artificial Sequence
  synthetic sequence
taaaggcgatact

SEQ ID NO: 17042 - DNA, 13 bp, Artificial Sequence
  synthetic sequence
tcgagcgcctgca

SEQ ID NO: 17043 - DNA, 13 bp, Artificial Sequence
  synthetic sequence
acttgtagccttt

SEQ ID NO: 17044 - DNA, 13 bp, Artificial Sequence
  synthetic sequence
cgatgggcgtcta

SEQ ID NO: 17045 - DNA, 13 bp, Artificial Sequence
  synthetic sequence
gtcgaaagagcca

SEQ ID NO: 17046 - DNA, 13 bp, Artificial Sequence
  synthetic sequence
cgtccagcaggag

SEQ ID NO: 17047 - DNA, 13 bp, Artificial Sequence
  synthetic sequence
cgatctctattta

SEQ ID NO: 17048 - DNA, 13 bp, Artificial Sequence
  synthetic sequence
tcggcatcgccta

SEQ ID NO: 17049 - DNA, 13 bp, Artificial Sequence
  synthetic sequence
tgactgacctttc

SEQ ID NO: 17050 - DNA, 13 bp, Artificial Sequence
  synthetic sequence
ggtggtcgaggaa

SEQ ID NO: 17051 - DNA, 13 bp, Artificial Sequence
  synthetic sequence
tgatagcgcattg

SEQ ID NO: 17052 - DNA, 13 bp, Artificial Sequence
  synthetic sequence
tatcgatcggccc

SEQ ID NO: 17053 - DNA, 13 bp, Artificial Sequence
  synthetic sequence
acgtcactcacct

SEQ ID NO: 17054 - DNA, 13 bp, Artificial Sequence
  synthetic sequence
tttcaggttggac

SEQ ID NO: 17055 - DNA, 13 bp, Artificial Sequence
  synthetic sequence
ttatggtctggaa

SEQ ID NO: 17056 - DNA, 13 bp, Artificial Sequence
  synthetic sequence
cgcctgaaaggct

SEQ ID NO: 17057 - DNA, 13 bp, Artificial Sequence
  synthetic sequence
tgttcaccataca

SEQ ID NO: 17058 - DNA, 13 bp, Artificial Sequence
  synthetic sequence
ggcttcgaccgca

SEQ ID NO: 17059 - DNA, 13 bp, Artificial Sequence
  synthetic sequence
cctcatcacggct

SEQ ID NO: 17060 - DNA, 13 bp, Artificial Sequence
  synthetic sequence
gttacgcctctgt

SEQ ID NO: 17061 - DNA, 13 bp, Artificial Sequence
  synthetic sequence
aactcaattcaga

SEQ ID NO: 17062 - DNA, 13 bp, Artificial Sequence
  synthetic sequence
gaccagcgcatca

SEQ ID NO: 17063 - DNA, 13 bp, Artificial Sequence
  synthetic sequence
atggcgcagcgga

SEQ ID NO: 17064 - DNA, 13 bp, Artificial Sequence
  synthetic sequence
cgctgcttgagct

SEQ ID NO: 17065 - DNA, 13 bp, Artificial Sequence
  synthetic sequence
cagctcaacgttg

SEQ ID NO: 17066 - DNA, 13 bp, Artificial Sequence
  synthetic sequence
ctggaacagctgc

SEQ ID NO: 17067 - DNA, 13 bp, Artificial Sequence
  synthetic sequence
cggtcttcgcctg

SEQ ID NO: 17068 - DNA, 13 bp, Artificial Sequence
  synthetic sequence
cttcccgtccttg

SEQ ID NO: 17069 - DNA, 13 bp, Artificial Sequence
  synthetic sequence
cgcctgatcaatg

SEQ ID NO: 17070 - DNA, 13 bp, Artificial Sequence
  synthetic sequence
agcgacaaaagat

SEQ ID NO: 17071 - DNA, 13 bp, Artificial Sequence
  synthetic sequence
catatagcatgac

SEQ ID NO: 17072 - DNA, 13 bp, Artificial Sequence
  synthetic sequence
gcttttgtggccg

SEQ ID NO: 17073 - DNA, 13 bp, Artificial Sequence
  synthetic sequence
gtatcgatctgga

SEQ ID NO: 17074 - DNA, 13 bp, Artificial Sequence
  synthetic sequence
ggtcagctgcaac

SEQ ID NO: 17075 - DNA, 13 bp, Artificial Sequence
  synthetic sequence
gacgttcgccttt

SEQ ID NO: 17076 - DNA, 13 bp, Artificial Sequence
  synthetic sequence
cagatgcttttgg

SEQ ID NO: 17077 - DNA, 13 bp, Artificial Sequence
  synthetic sequence
accacacactcgg

SEQ ID NO: 17078 - DNA, 13 bp, Artificial Sequence
  synthetic sequence
agagcccgatgcc

SEQ ID NO: 17079 - DNA, 13 bp, Artificial Sequence
  synthetic sequence
aaggtatcggcta

SEQ ID NO: 17080 - DNA, 13 bp, Artificial Sequence
  synthetic sequence
aaaattcccgcaa

SEQ ID NO: 17081 - DNA, 13 bp, Artificial Sequence
  synthetic sequence
gaaacgcacctat

SEQ ID NO: 17082 - DNA, 13 bp, Artificial Sequence
  synthetic sequence
taacagtttgttc

SEQ ID NO: 17083 - DNA, 13 bp, Artificial Sequence
  synthetic sequence
aaccatttcaccg

SEQ ID NO: 17084 - DNA, 13 bp, Artificial Sequence
  synthetic sequence
cttccggtatcgg

SEQ ID NO: 17085 - DNA, 13 bp, Artificial Sequence
  synthetic sequence
caattggagaagt

SEQ ID NO: 17086 - DNA, 13 bp, Artificial Sequence
  synthetic sequence
cgggacatcagga

SEQ ID NO: 17087 - DNA, 13 bp, Artificial Sequence
  synthetic sequence
tccatgaatcagt

SEQ ID NO: 17088 - DNA, 13 bp, Artificial Sequence
  synthetic sequence
cctagtcttcctg

SEQ ID NO: 17089 - DNA, 13 bp, Artificial Sequence
  synthetic sequence
gacctggtcgcta

SEQ ID NO: 17090 - DNA, 13 bp, Artificial Sequence
  synthetic sequence
tgcgttcaaggaa

SEQ ID NO: 17091 - DNA, 13 bp, Artificial Sequence
  synthetic sequence
tcggtgtcgccga

SEQ ID NO: 17092 - DNA, 13 bp, Artificial Sequence
  synthetic sequence
tcgaacggcttgt

SEQ ID NO: 17093 - DNA, 13 bp, Artificial Sequence
  synthetic sequence
gtcaccttggtca

SEQ ID NO: 17094 - DNA, 13 bp, Artificial Sequence
  synthetic sequence
gcgacttcacaca

SEQ ID NO: 17095 - DNA, 13 bp, Artificial Sequence
  synthetic sequence
ctccaaacaacga

SEQ ID NO: 17096 - DNA, 13 bp, Artificial Sequence
  synthetic sequence
aactcggttaccg

SEQ ID NO: 17097 - DNA, 13 bp, Artificial Sequence
  synthetic sequence
gttatttgcggga

SEQ ID NO: 17098 - DNA, 13 bp, Artificial Sequence
  synthetic sequence
aaggtgtgcgcgt

SEQ ID NO: 17099 - DNA, 13 bp, Artificial Sequence
  synthetic sequence
ttggataaacggg

SEQ ID NO: 17100 - DNA, 13 bp, Artificial Sequence
  synthetic sequence
ttccaaatagcct

SEQ ID NO: 17101 - DNA, 13 bp, Artificial Sequence
  synthetic sequence
gagttgctccata

SEQ ID NO: 17102 - DNA, 13 bp, Artificial Sequence
  synthetic sequence
gatttgtccgaag

SEQ ID NO: 17103 - DNA, 13 bp, Artificial Sequence
  synthetic sequence
acgtcacccggtt

SEQ ID NO: 17104 - DNA, 13 bp, Artificial Sequence
  synthetic sequence
atttatctcccgt

SEQ ID NO: 17105 - DNA, 13 bp, Artificial Sequence
  synthetic sequence
cactggaacctgt

SEQ ID NO: 17106 - DNA, 13 bp, Artificial Sequence
  synthetic sequence
cgccatttatata

SEQ ID NO: 17107 - DNA, 13 bp, Artificial Sequence
  synthetic sequence
ggtccaatcgcag

SEQ ID NO: 17108 - DNA, 13 bp, Artificial Sequence
  synthetic sequence
cttccgtcacaat

SEQ ID NO: 17109 - DNA, 13 bp, Artificial Sequence
  synthetic sequence
atcgcacaaccac

SEQ ID NO: 17110 - DNA, 13 bp, Artificial Sequence
  synthetic sequence
ataaatgcgatga

SEQ ID NO: 17111 - DNA, 13 bp, Artificial Sequence
  synthetic sequence
agcagcgactctg

SEQ ID NO: 17112 - DNA, 13 bp, Artificial Sequence
  synthetic sequence
aacgagaattcag

SEQ ID NO: 17113 - DNA, 13 bp, Artificial Sequence
  synthetic sequence
tctatcatgaatt

SEQ ID NO: 17114 - DNA, 13 bp, Artificial Sequence
  synthetic sequence
cgcagttatctta

SEQ ID NO: 17115 - DNA, 13 bp, Artificial Sequence
  synthetic sequence
cctgcgtcagctt

SEQ ID NO: 17116 - DNA, 13 bp, Artificial Sequence
  synthetic sequence
agccactgcaccg

SEQ ID NO: 17117 - DNA, 13 bp, Artificial Sequence
  synthetic sequence
gcttccatcctcc

SEQ ID NO: 17118 - DNA, 13 bp, Artificial Sequence
  synthetic sequence
gacctggaacatt

SEQ ID NO: 17119 - DNA, 13 bp, Artificial Sequence
  synthetic sequence
cccagattcggcc

SEQ ID NO: 17120 - DNA, 13 bp, Artificial Sequence
  synthetic sequence
cgtggcacaaagt

SEQ ID NO: 17121 - DNA, 13 bp, Artificial Sequence
  synthetic sequence
aacggctttcggc

SEQ ID NO: 17122 - DNA, 13 bp, Artificial Sequence
  synthetic sequence
cggtggagttgcg

SEQ ID NO: 17123 - DNA, 13 bp, Artificial Sequence
  synthetic sequence
gtcaacagaggaa

SEQ ID NO: 17124 - DNA, 13 bp, Artificial Sequence
  synthetic sequence
cttttcaggaata

SEQ ID NO: 17125 - DNA, 13 bp, Artificial Sequence
  synthetic sequence
ctgatttgcgccg

SEQ ID NO: 17126 - DNA, 13 bp, Artificial Sequence
  synthetic sequence
agataaaagaagt

SEQ ID NO: 17127 - DNA, 13 bp, Artificial Sequence
  synthetic sequence
gctgtacagcagc

SEQ ID NO: 17128 - DNA, 13 bp, Artificial Sequence
  synthetic sequence
ccggtggtggtag

SEQ ID NO: 17129 - DNA, 13 bp, Artificial Sequence
  synthetic sequence
agccggcaagcaa

SEQ ID NO: 17130 - DNA, 13 bp, Artificial Sequence
  synthetic sequence
gacatacatgcca

SEQ ID NO: 17131 - DNA, 13 bp, Artificial Sequence
  synthetic sequence
tttctcttcggtg

SEQ ID NO: 17132 - DNA, 13 bp, Artificial Sequence
  synthetic sequence
ttcagaaatgagt

SEQ ID NO: 17133 - DNA, 13 bp, Artificial Sequence
  synthetic sequence
acggcatcgtgct

SEQ ID NO: 17134 - DNA, 13 bp, Artificial Sequence
  synthetic sequence
gaaagattattca

SEQ ID NO: 17135 - DNA, 13 bp, Artificial Sequence
  synthetic sequence
aatgcgcaatttg

SEQ ID NO: 17136 - DNA, 13 bp, Artificial Sequence
  synthetic sequence
agatccttccgga

SEQ ID NO: 17137 - DNA, 13 bp, Artificial Sequence
  synthetic sequence
tgagctttatttg

SEQ ID NO: 17138 - DNA, 13 bp, Artificial Sequence
  synthetic sequence
gtcatcgggtgaa

SEQ ID NO: 17139 - DNA, 13 bp, Artificial Sequence
  synthetic sequence
agcttccatcaac

SEQ ID NO: 17140 - DNA, 13 bp, Artificial Sequence
  synthetic sequence
ctaatatctccaa

SEQ ID NO: 17141 - DNA, 13 bp, Artificial Sequence
  synthetic sequence
tcattttgtgtga

SEQ ID NO: 17142 - DNA, 13 bp, Artificial Sequence
  synthetic sequence
gaaggacgaactg

SEQ ID NO: 17143 - DNA, 13 bp, Artificial Sequence
  synthetic sequence
gcggtcatgtcga

SEQ ID NO: 17144 - DNA, 13 bp, Artificial Sequence
  synthetic sequence
ccatcgtgatgcc

SEQ ID NO: 17145 - DNA, 13 bp, Artificial Sequence
  synthetic sequence
ggcacaatcaagt

SEQ ID NO: 17146 - DNA, 13 bp, Artificial Sequence
  synthetic sequence
tatactggatcgg

SEQ ID NO: 17147 - DNA, 13 bp, Artificial Sequence
  synthetic sequence
aagttcatccaca

SEQ ID NO: 17148 - DNA, 13 bp, Artificial Sequence
  synthetic sequence
tcgaggatattgg

SEQ ID NO: 17149 - DNA, 13 bp, Artificial Sequence
  synthetic sequence
aaggctctcaagg

SEQ ID NO: 17150 - DNA, 13 bp, Artificial Sequence
  synthetic sequence
gacgcccactgct

SEQ ID NO: 17151 - DNA, 13 bp, Artificial Sequence
  synthetic sequence
taacgccgtcgct

SEQ ID NO: 17152 - DNA, 13 bp, Artificial Sequence
  synthetic sequence
tattcccttccaa

SEQ ID NO: 17153 - DNA, 13 bp, Artificial Sequence
  synthetic sequence
acttgatcgggtt

SEQ ID NO: 17154 - DNA, 13 bp, Artificial Sequence
  synthetic sequence
ttgaaccgctgta

SEQ ID NO: 17155 - DNA, 13 bp, Artificial Sequence
  synthetic sequence
ttgctaactcagt

SEQ ID NO: 17156 - DNA, 13 bp, Artificial Sequence
  synthetic sequence
gaagatgcgattg

SEQ ID NO: 17157 - DNA, 13 bp, Artificial Sequence
  synthetic sequence
catccagctcgtc

SEQ ID NO: 17158 - DNA, 13 bp, Artificial Sequence
  synthetic sequence
tattaaacaccct

SEQ ID NO: 17159 - DNA, 13 bp, Artificial Sequence
  synthetic sequence
ggcaagcgaacgt

SEQ ID NO: 17160 - DNA, 13 bp, Artificial Sequence
  synthetic sequence
gatccgaattcgg

SEQ ID NO: 17161 - DNA, 13 bp, Artificial Sequence
  synthetic sequence
ttgcgcggattca

SEQ ID NO: 17162 - DNA, 13 bp, Artificial Sequence
  synthetic sequence
attagacgtccga

SEQ ID NO: 17163 - DNA, 13 bp, Artificial Sequence
  synthetic sequence
acttaccgcagca

SEQ ID NO: 17164 - DNA, 13 bp, Artificial Sequence
  synthetic sequence
aattatcagcatt

SEQ ID NO: 17165 - DNA, 13 bp, Artificial Sequence
  synthetic sequence
ttcacttctcttg

SEQ ID NO: 17166 - DNA, 13 bp, Artificial Sequence
  synthetic sequence
tgcgttgaagtca

SEQ ID NO: 17167 - DNA, 13 bp, Artificial Sequence
  synthetic sequence
gataataatccgt

SEQ ID NO: 17168 - DNA, 13 bp, Artificial Sequence
  synthetic sequence
actttccgcactt

SEQ ID NO: 17169 - DNA, 13 bp, Artificial Sequence
  synthetic sequence
ctgtgatgtataa

SEQ ID NO: 17170 - DNA, 13 bp, Artificial Sequence
  synthetic sequence
cgaataacatgcc

SEQ ID NO: 17171 - DNA, 13 bp, Artificial Sequence
  synthetic sequence
gtcattttattgc

SEQ ID NO: 17172 - DNA, 13 bp, Artificial Sequence
  synthetic sequence
atgcttgccctgg

SEQ ID NO: 17173 - DNA, 13 bp, Artificial Sequence
  synthetic sequence
ttcaagtgtcgtt

SEQ ID NO: 17174 - DNA, 13 bp, Artificial Sequence
  synthetic sequence
tatccatttatgt

SEQ ID NO: 17175 - DNA, 13 bp, Artificial Sequence
  synthetic sequence
accaacggcacca

SEQ ID NO: 17176 - DNA, 13 bp, Artificial Sequence
  synthetic sequence
atggtggcgaccg

SEQ ID NO: 17177 - DNA, 13 bp, Artificial Sequence
  synthetic sequence
tgatacagcgtca

SEQ ID NO: 17178 - DNA, 13 bp, Artificial Sequence
  synthetic sequence
gaaatcattctta

SEQ ID NO: 17179 - DNA, 13 bp, Artificial Sequence
  synthetic sequence
atcaggcagccca

SEQ ID NO: 17180 - DNA, 13 bp, Artificial Sequence
  synthetic sequence
ggcagcagtatct

SEQ ID NO: 17181 - DNA, 13 bp, Artificial Sequence
  synthetic sequence
ctgggccacaata

SEQ ID NO: 17182 - DNA, 13 bp, Artificial Sequence
  synthetic sequence
aaatggcatgggc

SEQ ID NO: 17183 - DNA, 13 bp, Artificial Sequence
  synthetic sequence
cgccacaccaaaa

SEQ ID NO: 17184 - DNA, 13 bp, Artificial Sequence
  synthetic sequence
tgatgaatgcgat

SEQ ID NO: 17185 - DNA, 13 bp, Artificial Sequence
  synthetic sequence
gtctcgcctgcat

SEQ ID NO: 17186 - DNA, 13 bp, Artificial Sequence
  synthetic sequence
caagatcatcggg

SEQ ID NO: 17187 - DNA, 13 bp, Artificial Sequence
  synthetic sequence
cacgctgatggcg

SEQ ID NO: 17188 - DNA, 13 bp, Artificial Sequence
  synthetic sequence
tgtcgcactcatt

SEQ ID NO: 17189 - DNA, 13 bp, Artificial Sequence
  synthetic sequence
tttgatttgcttt

SEQ ID NO: 17190 - DNA, 13 bp, Artificial Sequence
  synthetic sequence
tcctgcgctttga

SEQ ID NO: 17191 - DNA, 13 bp, Artificial Sequence
  synthetic sequence
gctatcgtccggt

SEQ ID NO: 17192 - DNA, 13 bp, Artificial Sequence
  synthetic sequence
acgccgctggaat

SEQ ID NO: 17193 - DNA, 13 bp, Artificial Sequence
  synthetic sequence
cttcctgcccgaa

SEQ ID NO: 17194 - DNA, 13 bp, Artificial Sequence
  synthetic sequence
ctactactttctc

SEQ ID NO: 17195 - DNA, 13 bp, Artificial Sequence
  synthetic sequence
ataaccaacacac

SEQ ID NO: 17196 - DNA, 13 bp, Artificial Sequence
  synthetic sequence
acgctcattggaa

SEQ ID NO: 17197 - DNA, 13 bp, Artificial Sequence
  synthetic sequence
agcctggggttcc

SEQ ID NO: 17198 - DNA, 13 bp, Artificial Sequence
  synthetic sequence
ttggagtagaaag

SEQ ID NO: 17199 - DNA, 13 bp, Artificial Sequence
  synthetic sequence
gctccacggtggt

SEQ ID NO: 17200 - DNA, 13 bp, Artificial Sequence
  synthetic sequence
tgcaggcgaagct

SEQ ID NO: 17201 - DNA, 13 bp, Artificial Sequence
  synthetic sequence
ttggcgcacgcga

SEQ ID NO: 17202 - DNA, 13 bp, Artificial Sequence
  synthetic sequence
agtcaaaacttta

SEQ ID NO: 17203 - DNA, 13 bp, Artificial Sequence
  synthetic sequence
gaaacctcctcgg

SEQ ID NO: 17204 - DNA, 13 bp, Artificial Sequence
  synthetic sequence
agaccgcacactc

SEQ ID NO: 17205 - DNA, 13 bp, Artificial Sequence
  synthetic sequence
cggcaggctggtt

SEQ ID NO: 17206 - DNA, 13 bp, Artificial Sequence
  synthetic sequence
ccaagatcactct

SEQ ID NO: 17207 - DNA, 13 bp, Artificial Sequence
  synthetic sequence
ctgctcacctccg

SEQ ID NO: 17208 - DNA, 13 bp, Artificial Sequence
  synthetic sequence
cgagagtgatccc

SEQ ID NO: 17209 - DNA, 13 bp, Artificial Sequence
  synthetic sequence
aattctacttaca

SEQ ID NO: 17210 - DNA, 13 bp, Artificial Sequence
  synthetic sequence
aacctcttatctt

SEQ ID NO: 17211 - DNA, 13 bp, Artificial Sequence
  synthetic sequence
ttcgtaaacgatg

SEQ ID NO: 17212 - DNA, 13 bp, Artificial Sequence
  synthetic sequence
cagttgatcctgt

SEQ ID NO: 17213 - DNA, 13 bp, Artificial Sequence
  synthetic sequence
taagtgcctcaag

SEQ ID NO: 17214 - DNA, 13 bp, Artificial Sequence
  synthetic sequence
atgcttctttatc

SEQ ID NO: 17215 - DNA, 13 bp, Artificial Sequence
  synthetic sequence
acggtaaatgata

SEQ ID NO: 17216 - DNA, 13 bp, Artificial Sequence
  synthetic sequence
ttctcgccgctga

SEQ ID NO: 17217 - DNA, 13 bp, Artificial Sequence
  synthetic sequence
caatcgtcaactt

SEQ ID NO: 17218 - DNA, 13 bp, Artificial Sequence
  synthetic sequence
ccgcaaccaggat

SEQ ID NO: 17219 - DNA, 13 bp, Artificial Sequence
  synthetic sequence
tcgtacggataaa

SEQ ID NO: 17220 - DNA, 13 bp, Artificial Sequence
  synthetic sequence
tagatcagaaaac

SEQ ID NO: 17221 - DNA, 13 bp, Artificial Sequence
  synthetic sequence
tatgtgcatcagc

SEQ ID NO: 17222 - DNA, 13 bp, Artificial Sequence
  synthetic sequence
tcttcagggttag

SEQ ID NO: 17223 - DNA, 13 bp, Artificial Sequence
  synthetic sequence
agaaatggtgcgt

SEQ ID NO: 17224 - DNA, 13 bp, Artificial Sequence
  synthetic sequence
gtctatgcgcagc

SEQ ID NO: 17225 - DNA, 13 bp, Artificial Sequence
  synthetic sequence
gtccgcgcatcca

SEQ ID NO: 17226 - DNA, 13 bp, Artificial Sequence
  synthetic sequence
acacagtgctggt

SEQ ID NO: 17227 - DNA, 13 bp, Artificial Sequence
  synthetic sequence
ggacagtatgcaa

SEQ ID NO: 17228 - DNA, 13 bp, Artificial Sequence
  synthetic sequence
tcgttaccgctaa

SEQ ID NO: 17229 - DNA, 13 bp, Artificial Sequence
  synthetic sequence
tcttctggtacga

SEQ ID NO: 17230 - DNA, 13 bp, Artificial Sequence
  synthetic sequence
ccagacgcaaatg

SEQ ID NO: 17231 - DNA, 13 bp, Artificial Sequence
  synthetic sequence
gaggcgaacaggg

SEQ ID NO: 17232 - DNA, 13 bp, Artificial Sequence
  synthetic sequence
actgctgcttgct

SEQ ID NO: 17233 - DNA, 13 bp, Artificial Sequence
  synthetic sequence
ctgcgacgagcca

SEQ ID NO: 17234 - DNA, 13 bp, Artificial Sequence
  synthetic sequence
cggtgcttggaaa

SEQ ID NO: 17235 - DNA, 13 bp, Artificial Sequence
  synthetic sequence
cgatcaagtaagg

SEQ ID NO: 17236 - DNA, 13 bp, Artificial Sequence
  synthetic sequence
tgacattacttcc

SEQ ID NO: 17237 - DNA, 13 bp, Artificial Sequence
  synthetic sequence
gcctgctggtgaa

SEQ ID NO: 17238 - DNA, 13 bp, Artificial Sequence
  synthetic sequence
ttttggcgttgag

SEQ ID NO: 17239 - DNA, 13 bp, Artificial Sequence
  synthetic sequence
tcttcgtagctca

SEQ ID NO: 17240 - DNA, 13 bp, Artificial Sequence
  synthetic sequence
atatgactctggc

SEQ ID NO: 17241 - DNA, 13 bp, Artificial Sequence
  synthetic sequence
cacgtagaggccc

SEQ ID NO: 17242 - DNA, 13 bp, Artificial Sequence
  synthetic sequence
tcccgctctcaaa

SEQ ID NO: 17243 - DNA, 13 bp, Artificial Sequence
  synthetic sequence
gacgatcacttcg

SEQ ID NO: 17244 - DNA, 13 bp, Artificial Sequence
  synthetic sequence
tgctgctctacat

SEQ ID NO: 17245 - DNA, 13 bp, Artificial Sequence
  synthetic sequence
cagcagctgtttc

SEQ ID NO: 17246 - DNA, 13 bp, Artificial Sequence
  synthetic sequence
gctttctatatat

SEQ ID NO: 17247 - DNA, 13 bp, Artificial Sequence
  synthetic sequence
tgccattacttcg

SEQ ID NO: 17248 - DNA, 13 bp, Artificial Sequence
  synthetic sequence
tcagcgtaaaatt

SEQ ID NO: 17249 - DNA, 13 bp, Artificial Sequence
  synthetic sequence
accggttattaag

SEQ ID NO: 17250 - DNA, 13 bp, Artificial Sequence
  synthetic sequence
gagagaagtttct

SEQ ID NO: 17251 - DNA, 13 bp, Artificial Sequence
  synthetic sequence
ggcggtacactgt

SEQ ID NO: 17252 - DNA, 13 bp, Artificial Sequence
  synthetic sequence
caccggcgtgtta

SEQ ID NO: 17253 - DNA, 13 bp, Artificial Sequence
  synthetic sequence
agctgccgatccg

SEQ ID NO: 17254 - DNA, 13 bp, Artificial Sequence
  synthetic sequence
tcacaataattgg

SEQ ID NO: 17255 - DNA, 13 bp, Artificial Sequence
  synthetic sequence
ttgccgcagccag

SEQ ID NO: 17256 - DNA, 13 bp, Artificial Sequence
  synthetic sequence
agcgcaggcgtca

SEQ ID NO: 17257 - DNA, 13 bp, Artificial Sequence
  synthetic sequence
attatcactggaa

SEQ ID NO: 17258 - DNA, 13 bp, Artificial Sequence
  synthetic sequence
acacgcgaatatc

SEQ ID NO: 17259 - DNA, 13 bp, Artificial Sequence
  synthetic sequence
gaatgccggtctg

SEQ ID NO: 17260 - DNA, 13 bp, Artificial Sequence
  synthetic sequence
ttggccgcgagat

SEQ ID NO: 17261 - DNA, 13 bp, Artificial Sequence
  synthetic sequence
cgccggtgattgc

SEQ ID NO: 17262 - DNA, 13 bp, Artificial Sequence
  synthetic sequence
gtgtcgccgtagg

SEQ ID NO: 17263 - DNA, 13 bp, Artificial Sequence
  synthetic sequence
caacgataattaa

SEQ ID NO: 17264 - DNA, 13 bp, Artificial Sequence
  synthetic sequence
caccaccattgtc

SEQ ID NO: 17265 - DNA, 13 bp, Artificial Sequence
  synthetic sequence
cccagtgtcagtt

SEQ ID NO: 17266 - DNA, 13 bp, Artificial Sequence
  synthetic sequence
agcgcgtgctgca

SEQ ID NO: 17267 - DNA, 13 bp, Artificial Sequence
  synthetic sequence
acgctcagccttc

SEQ ID NO: 17268 - DNA, 13 bp, Artificial Sequence
  synthetic sequence
ttcgctcgatcca

SEQ ID NO: 17269 - DNA, 13 bp, Artificial Sequence
  synthetic sequence
ggcattaaccccg

SEQ ID NO: 17270 - DNA, 13 bp, Artificial Sequence
  synthetic sequence
tttctaaaggaaa

SEQ ID NO: 17271 - DNA, 13 bp, Artificial Sequence
  synthetic sequence
gtggcgacgccat

SEQ ID NO: 17272 - DNA, 13 bp, Artificial Sequence
  synthetic sequence
ctattaccatgag

SEQ ID NO: 17273 - DNA, 13 bp, Artificial Sequence
  synthetic sequence
cagtgaaattagc

SEQ ID NO: 17274 - DNA, 13 bp, Artificial Sequence
  synthetic sequence
tgtaccccggtgc

SEQ ID NO: 17275 - DNA, 13 bp, Artificial Sequence
  synthetic sequence
taccgaaagcagc

SEQ ID NO: 17276 - DNA, 13 bp, Artificial Sequence
  synthetic sequence
agcttatctctat

SEQ ID NO: 17277 - DNA, 13 bp, Artificial Sequence
  synthetic sequence
agtttctgaattt

SEQ ID NO: 17278 - DNA, 13 bp, Artificial Sequence
  synthetic sequence
cattaaagacttg

SEQ ID NO: 17279 - DNA, 13 bp, Artificial Sequence
  synthetic sequence
ccacgactttccc

SEQ ID NO: 17280 - DNA, 13 bp, Artificial Sequence
  synthetic sequence
ttttacaaagggg

SEQ ID NO: 17281 - DNA, 13 bp, Artificial Sequence
  synthetic sequence
gtactggttccgg

SEQ ID NO: 17282 - DNA, 13 bp, Artificial Sequence
  synthetic sequence
ccctgccgttcct

SEQ ID NO: 17283 - DNA, 13 bp, Artificial Sequence
  synthetic sequence
aaattgattgact

SEQ ID NO: 17284 - DNA, 13 bp, Artificial Sequence
  synthetic sequence
gcgcagtgtgacg

SEQ ID NO: 17285 - DNA, 13 bp, Artificial Sequence
  synthetic sequence
aagtcacttttcg

SEQ ID NO: 17286 - DNA, 13 bp, Artificial Sequence
  synthetic sequence
tggagaacatgct

SEQ ID NO: 17287 - DNA, 13 bp, Artificial Sequence
  synthetic sequence
ttggagcttttaa

SEQ ID NO: 17288 - DNA, 13 bp, Artificial Sequence
  synthetic sequence
gctgtgggtggaa

SEQ ID NO: 17289 - DNA, 13 bp, Artificial Sequence
  synthetic sequence
tatagctcgagca

SEQ ID NO: 17290 - DNA, 13 bp, Artificial Sequence
  synthetic sequence
atcgcctgttcaa

SEQ ID NO: 17291 - DNA, 13 bp, Artificial Sequence
  synthetic sequence
aagatgaagcaaa

SEQ ID NO: 17292 - DNA, 13 bp, Artificial Sequence
  synthetic sequence
ccgccgtgcattg

SEQ ID NO: 17293 - DNA, 13 bp, Artificial Sequence
  synthetic sequence
cggaagtgatagc

SEQ ID NO: 17294 - DNA, 13 bp, Artificial Sequence
  synthetic sequence
ccagcatctgcgt

SEQ ID NO: 17295 - DNA, 13 bp, Artificial Sequence
  synthetic sequence
tttgtagttctgc

SEQ ID NO: 17296 - DNA, 13 bp, Artificial Sequence
  synthetic sequence
gcagctgaccaag

SEQ ID NO: 17297 - DNA, 13 bp, Artificial Sequence
  synthetic sequence
acggtttccggga

SEQ ID NO: 17298 - DNA, 13 bp, Artificial Sequence
  synthetic sequence
tcgatcatcggca

SEQ ID NO: 17299 - DNA, 13 bp, Artificial Sequence
  synthetic sequence
catcttcaccgcc

SEQ ID NO: 17300 - DNA, 13 bp, Artificial Sequence
  synthetic sequence
actgcttgttcta

SEQ ID NO: 17301 - DNA, 13 bp, Artificial Sequence
  synthetic sequence
agctgggctccag

SEQ ID NO: 17302 - DNA, 13 bp, Artificial Sequence
  synthetic sequence
gacgagctgttcg

SEQ ID NO: 17303 - DNA, 13 bp, Artificial Sequence
  synthetic sequence
cagtaccttctcg

SEQ ID NO: 17304 - DNA, 13 bp, Artificial Sequence
  synthetic sequence
gaagaattcactg

SEQ ID NO: 17305 - DNA, 13 bp, Artificial Sequence
  synthetic sequence
tcaacgccgatgg

SEQ ID NO: 17306 - DNA, 13 bp, Artificial Sequence
  synthetic sequence
tttcttcgtttac

SEQ ID NO: 17307 - DNA, 13 bp, Artificial Sequence
  synthetic sequence
tagtcggagcatt

SEQ ID NO: 17308 - DNA, 13 bp, Artificial Sequence
  synthetic sequence
tcattgctgttaa

SEQ ID NO: 17309 - DNA, 13 bp, Artificial Sequence
  synthetic sequence
gggcgtggaactc

SEQ ID NO: 17310 - DNA, 13 bp, Artificial Sequence
  synthetic sequence
tcctatcagccat

SEQ ID NO: 17311 - DNA, 13 bp, Artificial Sequence
  synthetic sequence
accatgagcacgg

SEQ ID NO: 17312 - DNA, 13 bp, Artificial Sequence
  synthetic sequence
ggtcattctgtca

SEQ ID NO: 17313 - DNA, 13 bp, Artificial Sequence
  synthetic sequence
tgacaccactcat

SEQ ID NO: 17314 - DNA, 13 bp, Artificial Sequence
  synthetic sequence
agcggcacggtca

SEQ ID NO: 17315 - DNA, 13 bp, Artificial Sequence
  synthetic sequence
caatcacagcgat

SEQ ID NO: 17316 - DNA, 13 bp, Artificial Sequence
  synthetic sequence
cgctatctcatta

SEQ ID NO: 17317 - DNA, 13 bp, Artificial Sequence
  synthetic sequence
tatgagttgctcg

SEQ ID NO: 17318 - DNA, 13 bp, Artificial Sequence
  synthetic sequence
agtgcaatgtcgt

SEQ ID NO: 17319 - DNA, 13 bp, Artificial Sequence
  synthetic sequence
ccagcggtacgtt

SEQ ID NO: 17320 - DNA, 13 bp, Artificial Sequence
  synthetic sequence
tgctcgaatatgc

SEQ ID NO: 17321 - DNA, 13 bp, Artificial Sequence
  synthetic sequence
gctcagattgctg

SEQ ID NO: 17322 - DNA, 13 bp, Artificial Sequence
  synthetic sequence
ccgcagatgtttg

SEQ ID NO: 17323 - DNA, 13 bp, Artificial Sequence
  synthetic sequence
cacatcaccgttt

SEQ ID NO: 17324 - DNA, 13 bp, Artificial Sequence
  synthetic sequence
tggtccataccgc

SEQ ID NO: 17325 - DNA, 13 bp, Artificial Sequence
  synthetic sequence
acggcccaagctg

SEQ ID NO: 17326 - DNA, 13 bp, Artificial Sequence
  synthetic sequence
ctcgactgcgatg

SEQ ID NO: 17327 - DNA, 13 bp, Artificial Sequence
  synthetic sequence
agaaacaagctta

SEQ ID NO: 17328 - DNA, 13 bp, Artificial Sequence
  synthetic sequence
gattggataatta

SEQ ID NO: 17329 - DNA, 13 bp, Artificial Sequence
  synthetic sequence
agcgacctgatag

SEQ ID NO: 17330 - DNA, 13 bp, Artificial Sequence
  synthetic sequence
ggtgctgtccaag

SEQ ID NO: 17331 - DNA, 13 bp, Artificial Sequence
  synthetic sequence
atcaacaggtatc

SEQ ID NO: 17332 - DNA, 13 bp, Artificial Sequence
  synthetic sequence
tctcggtgcaggg

SEQ ID NO: 17333 - DNA, 13 bp, Artificial Sequence
  synthetic sequence
ctgccttatgttg

SEQ ID NO: 17334 - DNA, 13 bp, Artificial Sequence
  synthetic sequence
cgcggtcttcgta

SEQ ID NO: 17335 - DNA, 13 bp, Artificial Sequence
  synthetic sequence
aacttgtattgca

SEQ ID NO: 17336 - DNA, 13 bp, Artificial Sequence
  synthetic sequence
ctacaatttcttt

SEQ ID NO: 17337 - DNA, 13 bp, Artificial Sequence
  synthetic sequence
tggtggttcacct

SEQ ID NO: 17338 - DNA, 13 bp, Artificial Sequence
  synthetic sequence
tgtgtccaacgat

SEQ ID NO: 17339 - DNA, 13 bp, Artificial Sequence
  synthetic sequence
tgtcgcgtggtgt

SEQ ID NO: 17340 - DNA, 13 bp, Artificial Sequence
  synthetic sequence
tcggatgtgcgct

SEQ ID NO: 17341 - DNA, 13 bp, Artificial Sequence
  synthetic sequence
caggtagtagtct

SEQ ID NO: 17342 - DNA, 13 bp, Artificial Sequence
  synthetic sequence
acgcgatgaacgt

SEQ ID NO: 17343 - DNA, 13 bp, Artificial Sequence
  synthetic sequence
tgccgcaggcgtt

SEQ ID NO: 17344 - DNA, 13 bp, Artificial Sequence
  synthetic sequence
cgctaactcagta

SEQ ID NO: 17345 - DNA, 13 bp, Artificial Sequence
  synthetic sequence
accgggtacgggt

SEQ ID NO: 17346 - DNA, 13 bp, Artificial Sequence
  synthetic sequence
tacacgccgtggc

SEQ ID NO: 17347 - DNA, 13 bp, Artificial Sequence
  synthetic sequence
tgtttccttcact

SEQ ID NO: 17348 - DNA, 13 bp, Artificial Sequence
  synthetic sequence
cctttatatatgt

SEQ ID NO: 17349 - DNA, 13 bp, Artificial Sequence
  synthetic sequence
tgcaatgtctgaa

SEQ ID NO: 17350 - DNA, 13 bp, Artificial Sequence
  synthetic sequence
ttggaacgaaaag

SEQ ID NO: 17351 - DNA, 13 bp, Artificial Sequence
  synthetic sequence
ccaaagcaggaga

SEQ ID NO: 17352 - DNA, 13 bp, Artificial Sequence
  synthetic sequence
aatactcattggt

SEQ ID NO: 17353 - DNA, 13 bp, Artificial Sequence
  synthetic sequence
cacgttgtttgat

SEQ ID NO: 17354 - DNA, 13 bp, Artificial Sequence
  synthetic sequence
taactgcggttag

SEQ ID NO: 17355 - DNA, 13 bp, Artificial Sequence
  synthetic sequence
tgtatggaaaatg

SEQ ID NO: 17356 - DNA, 13 bp, Artificial Sequence
  synthetic sequence
catccccggcact

SEQ ID NO: 17357 - DNA, 13 bp, Artificial Sequence
  synthetic sequence
tgattacgcgctt

SEQ ID NO: 17358 - DNA, 13 bp, Artificial Sequence
  synthetic sequence
ttgtcctgccgct

SEQ ID NO: 17359 - DNA, 13 bp, Artificial Sequence
  synthetic sequence
ttaagcgcttgat

SEQ ID NO: 17360 - DNA, 13 bp, Artificial Sequence
  synthetic sequence
actgtttgccaca

SEQ ID NO: 17361 - DNA, 13 bp, Artificial Sequence
  synthetic sequence
tgttcatattgat

SEQ ID NO: 17362 - DNA, 13 bp, Artificial Sequence
  synthetic sequence
ccagccggatgta

SEQ ID NO: 17363 - DNA, 13 bp, Artificial Sequence
  synthetic sequence
tgaatgtaccgtt

SEQ ID NO: 17364 - DNA, 13 bp, Artificial Sequence
  synthetic sequence
ccactgaaaccga

SEQ ID NO: 17365 - DNA, 13 bp, Artificial Sequence
  synthetic sequence
acctataacaatt

SEQ ID NO: 17366 - DNA, 13 bp, Artificial Sequence
  synthetic sequence
ctccgtcaatacc

SEQ ID NO: 17367 - DNA, 13 bp, Artificial Sequence
  synthetic sequence
agaacaccggagt

SEQ ID NO: 17368 - DNA, 13 bp, Artificial Sequence
  synthetic sequence
taccaggccgatg

SEQ ID NO: 17369 - DNA, 13 bp, Artificial Sequence
  synthetic sequence
attgataaaaccg

SEQ ID NO: 17370 - DNA, 13 bp, Artificial Sequence
  synthetic sequence
aacagatttagcg

SEQ ID NO: 17371 - DNA, 13 bp, Artificial Sequence
  synthetic sequence
tcttggctactgc

SEQ ID NO: 17372 - DNA, 13 bp, Artificial Sequence
  synthetic sequence
ccgaagctgacta

SEQ ID NO: 17373 - DNA, 13 bp, Artificial Sequence
  synthetic sequence
atatacaagccga

SEQ ID NO: 17374 - DNA, 13 bp, Artificial Sequence
  synthetic sequence
gcatcttcatagc

SEQ ID NO: 17375 - DNA, 13 bp, Artificial Sequence
  synthetic sequence
cggcaccttgaac

SEQ ID NO: 17376 - DNA, 13 bp, Artificial Sequence
  synthetic sequence
ccattggggttgg

SEQ ID NO: 17377 - DNA, 13 bp, Artificial Sequence
  synthetic sequence
ccctgttcctttc

SEQ ID NO: 17378 - DNA, 13 bp, Artificial Sequence
  synthetic sequence
caatgacgtgtaa
